(19) United States
(12) Patent Application Publication
(10) Pub. No.: US 2025/0154503 A1
(43) Pub. Date: May 15, 2025

(54) COMPOSITIONS, SYSTEMS, AND METHODS FOR PROGRAMMING T CELL PHENOTYPES THROUGH TARGETED GENE REPRESSION

(71) Applicant: Tune Therapeutics, Inc., Seattle, WA (US)

(72) Inventors: Charles A. GERSBACH, Durham, NC (US); Tyler S. KLANN, Durham, NC (US); Akiko SEKI, Durham, NC (US); Nathaniel LAMBERT, Seattle, WA (US); Nathaniel CHARTRAND, Seattle, WA (US); Sheridan L. SWAN, Durham, NC (US)

(73) Assignee: Tune Therapeutics, Inc., Seattle, WA (US)

(21) Appl. No.: 18/728,432

(22) PCT Filed: Jan. 13, 2023
(86) PCT No.: PCT/US2023/060693

§ 371 Date: Jul. 11, 2024

Related U.S. Application Data
(60) Provisional application No. 63/299,905, filed on Jan. 14, 2022.
(60) Provisional application No. 63/299,907, filed on Jan. 14, 2022.

(51) Int. Cl. C12N 15/11; A61K 40/11; A61K 40/31; A61K 40/32; C12N 9/22; C12N 15/90

(52) U.S. Cl. CPC C12N 15/11; A61K 40/11; A61K 40/31; A61K 40/32; C12N 9/22; C12N 15/907; C12N 2310/20

(57) ABSTRACT

Provided in some aspects are epigenetic-modifying DNA-targeting systems, such as CRISPR-Cas/guide RNA systems, that bind to or target a target site in a gene or regulatory element thereof in a T cell. In some aspects, the provided epigenetic modifying DNA-targeting systems provided herein modulate a T cell phenotype or activity. In particular, the provided embodiments relate to the transcriptional repression of genes to promote a stem cell-like memory T (T_{SCM}) cell phenotype. In some aspects, also provided are compositions, polynucleotides, vectors, cells, and pluralities and combinations thereof, and methods and uses related to the provided epigenetic-modifying DNA-targeting systems, for example in modulating the phenotype in T cells including in connection with adoptive T cell therapy.

### CROSS-REFERENCE TO RELATED APPLICATIONS

[0001] This application claims priority from U.S. provisional application No. 63/299,905, filed Jan. 14, 2022, entitled “COMPOSITIONS, SYSTEMS, AND METHODS FOR PROGRAMMING T CELL PHENOTYPES THROUGH TARGETED GENE REPRESSION,” and U.S. provisional application No. 63/299,907, filed Jan. 14, 2022, entitled “COMPOSITIONS, SYSTEMS, AND METHODS FOR PROGRAMMING T CELL PHENOTYPES THROUGH TARGETED GENE REPRESSION,” the contents of which are incorporated by reference in their entireties.

### INCORPORATION BY REFERENCE OF SEQUENCE LISTING

[0002] The present application is being filed along with a Sequence Listing in electronic format. The Sequence Listing is provided as a file entitled 224742001640SeqList.xml, created Jan. 13, 2023, which is 2,019,897 in size. The information in the electronic format of the Sequence Listing is incorporated by reference in its entirety.

### FIELD

[0003] The present disclosure relates in some aspects to epigenetic-modifying DNA-targeting systems, such as CRISPR-Cas/guide RNA (gRNA) systems, that bind to or target a target site in a gene or regulatory element thereof in a T cell. In some aspects, the provided epigenetic modifying DNA-targeting systems of the present disclosure modulate a T cell phenotype or activity. In particular, the present disclosure relates to the transcriptional repression of genes whose transcriptional repression promotes a stem cell-like memory T (T_{SCM}) cell-like phenotype. In some aspects, the present disclosure is directed to methods and uses related to the provided compositions, for example in modulating the phenotype of T cells including in connection with methods of adoptive T cell therapy.

### BACKGROUND

[0004] The administration of T cells targeting a specific antigen, also known as Adoptive Cell Therapy (ACT), is a promising approach for treating diseases such as cancer. However, current ACT treatments face challenges including suboptimal T cell function, expansion, and persistence. Therefore, there is a need for new and improved methods to overcome these challenges. The present disclosure addresses these and other needs.

### SUMMARY

[0005] Provided herein are compositions, such as epigenetic-modifying DNA-targeting systems, DNA-targeting systems, guide RNAs (gRNAs), CRISPR-Cas-guide RNA combinations, fusion proteins, pluralities and combinations thereof that bind to or target a target site in a gene or regulatory element thereof in a T cell. Also provided are compositions, such as polynucleotides, vectors, cells, pharmaceutical compositions, pluralities and combinations thereof that encode or comprise the epigenetic-modifying DNA-targeting systems, guide RNAs (gRNAs), CRISPR-Cas-guide RNA combinations, fusion proteins or components thereof. Also provided are methods and uses related to any of the provided compositions, for example, for promoting stem cell-like memory T cell phenotype in T cells, and/or in the treatment of therapy of diseases or disorders.

[0006] Provided herein is an epigenetic-modifying DNA-targeting system, said DNA-targeting system comprising a fusion protein comprising: (a) a DNA-targeting domain capable of being targeted to a target site in a gene or regulatory DNA element thereof in a T cell; and (b) at least one effector domain capable of reducing transcription of the gene, wherein reduced transcription of the gene promotes a stem cell-like memory T-cell phenotype. In some of any of the provided embodiments, the DNA-targeting system is not able to introduce a genetic disruption or a DNA break at or near the target site. In some of any of the provided embodiments, the DNA-targeting domain comprises a Clustered Regularly Interspaced Short Palindromic Repeats associated (Cas)-guide RNA (gRNA) combination comprising (a) a Cas protein or a variant thereof and (b) at least one gRNA; a zinc finger protein (ZFP); a transcription activator-like effector (TALE); a meganuclease; a homing endonuclease; or an I-SceI enzyme or a variant thereof. In some embodiments, the DNA-targeting domain comprises a catalytically inactive variant of any of the foregoing. In some of any of the provided embodiments, the DNA-targeting domain comprises a Cas-gRNA combination comprising (a) a Cas protein or a variant thereof and (b) at least one gRNA.

[0007] Also provided herein is an epigenetic-modifying DNA-targeting system, said DNA-targeting system comprising: (a) a fusion protein comprising a Clustered Regularly Interspaced Short Palindromic Repeats associated (Cas) protein or variant thereof and at least one effector domain capable of reducing transcription of a gene is a T cell; and (b) at least one gRNA that targets the Cas protein or variant thereof of the fusion protein to a target site in the gene or regulatory DNA element thereof. In some embodiments, the reduced transcription of the gene promotes a stem cell-like memory T-cell phenotype.

[0008] In some of any of the provided embodiments, the stem cell-like memory T cell phenotype comprises one or more cell-surface markers selected from CCR7+, CD27+, CD45RA+, CD45RO−, CCR7+, CD62L+, CD28+, CD27+, IL-7Rα+, CXCR3+, CD95+, CD11a+, IL-2Rβ+, CD58+, and CD57−, or combinations thereof.

[0009] In some of any of the provided embodiments, the stem cell-like memory T cell phenotype comprises expression of CCR7 and/or CD27.

[0010] In some of any of the provided embodiments, the stem cell-like memory T cell phenotype comprises expression of CCR7 and CD27.

[0011] In some of any of the provided embodiments, the stem cell-like memory T cell phenotype is characterized by polyfunctional activity of the T cells to produce two or more cytokines following stimulation of the T cell with a stimulatory agent, optionally wherein the two or more cytokines are selected from among interferon-gamma (IFN-gamma), interleukin 2 (IL-2), and TNF-alpha.

[0012] In some of any of the provided embodiments, at least one gRNA is capable of complexing with the Cas protein or variant thereof, and targeting the Cas protein or the variant thereof to the target site.

[0013] In some of any of the provided embodiments, the at least one gRNA comprises a gRNA spacer sequence that is capable of hybridizing to the target site or is complementary to the target site.

[0014] In some of any of the provided embodiments, the Cas protein or a variant thereof is a Cas9 protein or a variant thereof.

[0015] In some of any of the provided embodiments, the Cas protein or a variant thereof is a Cas12 protein or a variant thereof.

[0016] In some of any of the provided embodiments, the Cas protein or a variant thereof is a variant Cas protein, wherein the variant Cas protein lacks nuclease activity or is a deactivated Cas (dCas) protein. In some of any of the provided embodiments, the variant Cas protein is a variant Cas9 protein that lacks nuclease activity or that is a deactivated Cas9 (dCas9) protein.

[0017] In some of any of the provided embodiments, the Cas9 protein or a variant thereof is a Staphylococcus aureus Cas9 (SaCas9) protein or a variant thereof. In some of any of the provided embodiments, the variant Cas9 is a Staphylococcus aureus dCas9 protein (dSaCas9) that comprises at least one amino acid mutation selected from D10A and N580A, with reference to numbering of positions of SEQ ID NO: 1461. In some of any of the provided embodiments, the variant Cas9 protein comprises the sequence set forth in SEQ ID NO: 1462, or an amino acid sequence that has at least 90%, 91%, 92%, 93%, 94%, 95%, 96%, 97%, 98%, or 99% sequence identity thereto. In some of any of the provided embodiments, the Cas9 protein or variant thereof is a Streptococcus pyogenes Cas9 (SpCas9) protein or a variant thereof. In some of any of the provided embodiments, the variant Cas9 is a Streptococcus pyogenes dCas9 (dSpCas9) protein that comprises at least one amino acid mutation selected from D10A and H840A, with reference to numbering of positions of SEQ ID NO: 1463. In some of any of the provided embodiments, the variant Cas9 protein comprises the sequence set forth in SEQ ID NO: 1464, or an amino acid sequence that has at least 90%, 91%, 92%, 93%, 94%, 95%, 96%, 97%, 98%, or 99% sequence identity thereto.

[0018] In some of any of the provided embodiments, the regulatory DNA element is an enhancer or a promoter.

[0019] In some of any of the provided embodiments, the gene is a DNA-binding gene. In some of any of the provided embodiments, the gene is selected from the list consisting of: BMP4, E2F7, ESRRG, LYL1, STAT5A, THAP10, ZNF362, ZSCAN1, ANHX, CPEB1, CSRNP1, EN2, EPAS1, IRX3, LHX8, NR5A2, PRDM16, RAX2, SCML4, SMAD1, SOX6, SUV39H1, TFDP1, ZNF287, ZNF438, ZNF681, ZNF853, BMP4, CARF, ESRRG, ESRRG, FOXR2, HOXA7, IRF9, KAT5, KLF5, NEUROD1, PAX6, PIN1, PURG, RARA, SNAPC5, STAT5A, TBX22, WT1, ZNF138, ZNF143, ZNF205, ZNF235, ZNF526, ZNF548, ZNF559, ZNF611, ZNF655, ZNF672, ZNF699, ZNF706, ZNF714, ZNF772, ZNF782, ZSCAN1, ZSCAN26, ADNP, AHRR, AKNA, ALX3, ALX4, AR, ARHGAP35, ARID3C, ARID5B, ASCL5, ATF6B, ATOH7, BARHL1, BARHL2, BATF, BBX, BHLHE40, BNC2, BRD4, BRD9, BSX, CCDC17, CDX1, CDX2, CDX4, CEBPB, CENPB, CLOCK, CREB3, CREB3L4, CSRNP3, CTCF, CUX1, CUX2, DACH2, DLX1, DLX4, DLX5, DLX6, DMRTB1, DNMT3B, DOTIL, DPF1, DR1, E2F2, E2F3, EBF3, EGR2, EHF, ELF5, ELMSAN1, EMX1, ETS2, ETV4, ETV4, ETV6, EZH1, FERD3L, FERD3L, FIZ1, FOS, FOSB, FOXA1, FOXA2, FOXA3, FOXC2, FOXD3, FOXE1, FOXJ3, FOXN2, FOXN4, FOXO1, FOXP3, FOXS1, GATA2, GATA3, GATAD2A, GCM2, GFI1, GLI2, GLYR1, GPBP1L1, GRHL1, GTF2B, GTF2I, HDAC2, HES2, HES7, HESX1, HEY1, HIF3A, HIVEP3, HLF, HLX, HMG20A, HMGA2, HMGN3, HMX2, HNF1A, HNF4G, HOXA1, HOXA11, HOXB1, HOXB2, HOXB3, HOXC12, HOXC9, HOXC9, HOXD9, HSF4, HSF5, IKZF1, IKZF2, IKZF3, IKZF4, IRF7, IRX3, ISL2, JRK, JRKL, KAT7, KDM1A, KDM2B, KDM5D, KLF14, KLF9, KMT2B, L3MBTL4, LEF1, LHX6, LHX9, LIN28A, LIN28A, LMX1A, MAF, MAFF, MBD3, MBD4, MBNL2, MED1, MED14, MED23, MED24, MEF2C, MEF2D, MEIS3, MESP1, MGA, MITF, MLX, MNX1, MYF5, MYOG, MYPOP, MYRFL, MYT1L, NCOR1, NEUROG1, NFAT5, NFATC2, NFATC3, NFE2L1, NFE2L3, NFIA, NFYB, NKX1-2, NKX2-3, NKX2-4, NKX2-5, NOTCH3, NOTO, NR1H2, NR1H4, NR112, NR2C2, NR2F1, OSR2, OTX1, OVOL1, PA2G4, PATZ1, PAX9, PAX9, PBX4, PGR, PITX1, PITX3, POU2F2, POU3F1, POU3F2, POU3F3, POU5F1, PRDM1, PRDM7, PRR12, PRRX1, RBCK1, RHOXF1, RUNX2, SALL3, SIM1, SIX1, SIX6, SKI, SKIL, SKOR1, SMAD2, SMAD5, SMYD3, SNAPC2, SOX1, SOX14, SOX30, SOX5, SOX6, SP2, SP3, SP5, SP8, SP9, SPIB, STAT5B, T, TBPL1, TBX5, TBX6, TCF12, TCF23, TCF3, TFAP2A, TFAP2E, TFDP2, TFDP3, TGIF2, TGIF2LX, THAP6, THRA, TIGD1, TIGD3, TIGD5, TLX3, TOX, TOX2, TRIM27, TRIM27, TRIM40, TRIM52, TSHZ2, VAX1, VEGFA, VSX1, WNT1, WNT3A, YBX1, YY1, YY2, ZBED5, ZBTB2, ZBTB21, ZBTB38, ZBTB4, ZBTB40, ZBTB42, ZBTB49, ZBTB7B, ZBTB7C, ZBTB8B, ZBTB9, ZC3H8, ZEB2, ZFHX2, ZFHX3, ZFP28, ZFP41, ZFP69B, ZFP90, ZGLP1, ZHX3, ZIC5, ZKSCAN1, ZKSCAN2, ZKSCAN7, ZNF107, ZNF121, ZNF132, ZNF135, ZNF140, ZNF141, ZNF222, ZNF225, ZNF229, ZNF230, ZNF248, ZNF25, ZNF26, ZNF267, ZNF280C, ZNF281, ZNF283, ZNF286B, ZNF304, ZNF317, ZNF318, ZNF320, ZNF33B, ZNF346, ZNF358, ZNF367, ZNF382, ZNF383, ZNF385B, ZNF391, ZNF415, ZNF423, ZNF43, ZNF432, ZNF433, ZNF436, ZNF441, ZNF443, ZNF461, ZNF462, ZNF468, ZNF473, ZNF483, ZNF486, ZNF491, ZNF507, ZNF514, ZNF519, ZNF540, ZNF543, ZNF546, ZNF549, ZNF555, ZNF562, ZNF567, ZNF569, ZNF574, ZNF577, ZNF596, ZNF610, ZNF616, ZNF621, ZNF626, ZNF627, ZNF629, ZNF630, ZNF630, ZNF641, ZNF645, ZNF658, ZNF660, ZNF662, ZNF677, ZNF682, ZNF697, ZNF703, ZNF705A, ZNF705B, ZNF705G, ZNF716, ZNF729, ZNF750, ZNF75A, ZNF765, ZNF771, ZNF773, ZNF774, ZNF778, ZNF784, ZNF789, ZNF804B, ZNF816, ZNF823, ZNF83, ZNF831, ZNF846, ZNF852, ZNF879, ZNF91, ZNF93, ZNF99, ZNF99, ZSCAN16, ZSCAN2, ZSCAN21, ZSCAN5A, and ZSCAN5B.

[0020] In some of any of the provided embodiments, the target site comprises the sequence set forth in any one of SEQ ID NOS: 1-484, a contiguous portion thereof of at least 14 nucleotides (nt), or a complementary sequence of any of the foregoing.

[0021] In some of any of the provided embodiments, the at least one gRNA comprises a gRNA spacer sequence comprising the sequence set forth in SEQ ID NO: 485-968, or a contiguous portion thereof of at least 14 nt. In some of any of the provided embodiments, the at least one gRNA further comprises the sequence set forth in SEQ ID NO: 1454.

[0022] In some of any of the provided embodiments, the at least one gRNA comprises a gRNA that comprises the sequence set forth in any one of SEQ ID NOS: 969-1452, optionally wherein the at least one gRNA is the gRNA set forth in any one of SEQ ID NOS: 969-1452.

[0023] In some of any of the provided embodiments, the gene is selected from the list consisting of: BMP4, E2F7, ESRRG, LYL1, STAT5A, THAP10, ZNF362, ZSCAN1, ANHX, CPEB1, CSRNP1, EN2, EPAS1, IRX3, LHX8, NR5A2, PRDM16, RAX2, SCML4, SMAD1, SOX6, SUV39H1, TFDP1, ZNF287, ZNF438, ZNF681, and ZNF853.

[0024] In some of any of the provided embodiments, the target site comprises the sequence set forth in any one of SEQ ID NOS: 1-27, a contiguous portion thereof of at least 14 nucleotides (nt), or a complementary sequence of any of the foregoing.

[0025] In some of any of the provided embodiments, the at least one gRNA comprises a gRNA spacer sequence comprising the sequence set forth in SEQ ID NO: 485-511, or a contiguous portion thereof of at least 14 nt. In some of any of the provided embodiments, the at least one gRNA further comprises the sequence set forth in SEQ ID NO: 1454.

[0026] In some of any of the provided embodiments, the at least one gRNA comprises a gRNA that comprises the sequence set forth in any one of SEQ ID NOS: 969-995, optionally wherein the at least one gRNA is the gRNA set forth in any one of SEQ ID NOS: 969-995.

[0027] In some of any of the provided embodiments, the gene is selected from the list consisting of: BMP4, E2F7, ESRRG, LYL1, STAT5A, THAP10, ZNF362, and ZSCAN1.

[0028] In some of any of the provided embodiments, the target site comprises the sequence set forth in any one of SEQ ID NOS: 1-8, a contiguous portion thereof of at least 14 nucleotides (nt), or a complementary sequence of any of the foregoing.

[0029] In some of any of the provided embodiments, the at least one gRNA comprises a gRNA spacer sequence comprising the sequence set forth in SEQ ID NO: 485-492, or a contiguous portion thereof of at least 14 nt. In some of any of the provided embodiments, the at least one gRNA further comprises the sequence set forth in SEQ ID NO: 1454.

[0030] In some of any of the provided embodiments, the at least one gRNA comprises a gRNA that comprises the sequence set forth in any one of SEQ ID NOS: 969-976, optionally wherein the at least one gRNA is the gRNA set forth in any one of SEQ ID NOS: 969-976.

[0031] In some of any of the provided embodiments, wherein the gRNA spacer sequence is between 14 nt and 24 nt, or between 16 nt and 22 nt in length. In some of any of the provided embodiments, the gRNA spacer sequence is 18 nt, 19 nt, 20 nt, 21 nt or 22 nt in length.

[0032] In some of any of the provided embodiments, the gRNA comprises modified nucleotides for increased stability.

[0033] In some of any of the provided embodiments, the at least one effector domain induces, catalyzes, or leads to transcription repression, transcription co-repression, or reduced transcription of the gene. In some of any of the provided embodiments, the at least one effector domain induces transcription repression.

[0034] In some of any of the provided embodiments, the at least one effector domain comprises a KRAB domain or a variant thereof.

[0035] In some of any of the provided embodiments, the at least one effector domain comprises the sequence set forth in SEQ ID NO: 1465, a portion thereof, or an amino acid sequence that has at least 90%, 91%, 92%, 93%, 94%, 95%, 96%, 97%, 98%, or 99% sequence identity to any of the foregoing.

[0036] In some of any of the provided embodiments, the at least one effector domain is selected from a ERF repressor domain, Mxi1 repressor domain, SID4X repressor domain, Mad-SID repressor domain. LSD1 repressor domain, or DNMT3A, DNMT3A/3L, DNMT3B domain binding protein or LSD1 repressor domain, or variant of any of the foregoing.

[0037] In some of any of the provided embodiments, the at least one effector domain comprises a sequence selected from any one of SEQ ID NOS: 1465, 1488-1495, or a domain thereof, a portion thereof, or an amino acid sequence that has at least 90%, 91%, 92%, 93%, 94%, 95%, 96%, 97%, 98%, or 99% sequence identity to any of the foregoing.

[0038] In some of any of the provided embodiments, the at least one effector domain is fused to the N-terminus, the C-terminus, or both the N-terminus and the C-terminus, of the DNA-targeting domain or a component thereof.

[0039] In some of any of the provided embodiments, the DNA-targeting system further comprises one or more nuclear localization signals (NLS).

[0040] In some of any of the provided embodiments, the DNA-targeting system further comprises one or more linkers connecting two or more of: the DNA-targeting domain, the at least one effector domain, and the one or more nuclear localization signals.

[0041] In some of any of the provided embodiments, the fusion protein comprises the sequence set forth in SEQ ID NO: 1458, or an amino acid sequence that has at least 90%, 91%, 92%, 93%, 94%, 95%, 96%, 97%, 98%, or 99% sequence identity thereto.

[0042] In some of any of the provided embodiments, reduced transcription of the gene further promotes increased production of IL-2 by the T cell.

[0043] In some of any of the provided embodiments, the epigenetic-modifying DNA-targeting system reduces expression of the gene in a T cell by a log 2 fold-change of at or lesser than −1.0.

[0044] In some of any of the provided embodiments, the epigenetic-modifying DNA-targeting system reduces surface expression of a T cell exhaustion marker selected from the group consisting of PD-1, CTLA-4, TIM-3, TOX, LAG-3, BTLA, 2B4, CD160, CD39, VISTA, and TIGIT.

[0045] Also provided herein is a guide RNA (gRNA) that binds a target site in a gene or regulatory DNA element thereof in a T cell. In some aspects, reduced transcription of the gene, when targeted by an epigenetic-modifying DNA-targeting system comprising the gRNA, promotes a stem cell-like memory T cell phenotype. In some of any of the provided embodiments, the stem cell-like memory T cell phenotype comprises one or more cell-surface markers selected from CCR7+, CD27+, CD45RA+, CD45RO−, CCR7+, CD62L+, CD28+, CD27+, IL-7Rα+, CXCR3+, CD95+, CD11a+, IL-2Rβ+, CD58+, and CD57−. In some of any of the provided embodiments, the stem cell-like memory T cell phenotype comprises expression of CCR7 and/or CD27. In some of any of the provided embodiments, the stem cell-like memory T cell phenotype comprises expression of CCR7 and/or CD27.

[0046] In some of any of the provided embodiments, the stem cell-like memory T cell phenotype is characterized by polyfunctional activity of the T cells to produce two or more cytokines following stimulation of the T cell with a stimulatory agent, optionally wherein the two or more cytokines are selected from among interferon-gamma (IFN-gamma), interleukin 2 (IL-2), and TNF-alpha.

[0047] In some of any of the provided embodiments, the gene is selected from the list consisting of: BMP4, E2F7, ESRRG, LYL1, STAT5A, THAP10, ZNF362, ZSCAN1, ANHX, CPEB1, CSRNP1, EN2, EPAS1, IRX3, LHX8, NR5A2, PRDM16, RAX2, SCML4, SMAD1, SOX6, SUV39H1, TFDP1, ZNF287, ZNF438, ZNF681, ZNF853, BMP4, CARF, ESRRG, ESRRG, FOXR2, HOXA7, IRF9, KAT5, KLF5, NEUROD1, PAX6, PIN1, PURG, RARA, SNAPC5, STAT5A, TBX22, WT1, ZNF138, ZNF143, ZNF205, ZNF235, ZNF526, ZNF548, ZNF559, ZNF611, ZNF655, ZNF672, ZNF699, ZNF706, ZNF714, ZNF772, ZNF782, ZSCAN1, ZSCAN26, ADNP, AHRR, AKNA, ALX3, ALX4, AR, ARHGAP35, ARID3C, ARID5B, ASCL5, ATF6B, ATOH7, BARHL1, BARHL2, BATF, BBX, BHLHE40, BNC2, BRD4, BRD9, BSX, CCDC17, CDX1, CDX2, CDX4, CEBPB, CENPB, CLOCK, CREB3, CREB3L4, CSRNP3, CTCF, CUX1, CUX2, DACH2, DLX1, DLX4, DLX5, DLX6, DMRTB1, DNMT3B, DOTIL, DPF1, DR1, E2F2, E2F3, EBF3, EGR2, EHF, ELF5, ELMSAN1, EMX1, ETS2, ETV4, ETV4, ETV6, EZH1, FERD3L, FERD3L, FIZ1, FOS, FOSB, FOXA1, FOXA2, FOXA3, FOXC2, FOXD3, FOXE1, FOXJ3, FOXN2, FOXN4, FOXO1, FOXP3, FOXS1, GATA2, GATA3, GATAD2A, GCM2, GFI1, GLI2, GLYR1, GPBP1L1, GRHL1, GTF2B, GTF2I, HDAC2, HES2, HES7, HESX1, HEY1, HIF3A, HIVEP3, HLF, HLX, HMG20A, HMGA2, HMGN3, HMX2, HNF1A, HNF4G, HOXA1, HOXA11, HOXB1, HOXB2, HOXB3, HOXC12, HOXC9, HOXC9, HOXD9, HSF4, HSF5, IKZF1, IKZF2, IKZF3, IKZF4, IRF7, IRX3, ISL2, JRK, JRKL, KAT7, KDM1A, KDM2B, KDM5D, KLF14, KLF9, KMT2B, L3MBTL4, LEF1, LHX6, LHX9, LIN28A, LIN28A, LMX1A, MAF, MAFF, MBD3, MBD4, MBNL2, MED1, MED14, MED23, MED24, MEF2C, MEF2D, MEIS3, MESP1, MGA, MITF, MLX, MNX1, MYF5, MYOG, MYPOP, MYRFL, MYT1L, NCOR1, NEUROG1, NFAT5, NFATC2, NFATC3, NFE2L1, NFE2L3, NFIA, NFYB, NKX1-2, NKX2-3, NKX2-4, NKX2-5, NOTCH3, NOTO, NR1H2, NR1H4, NR112, NR2C2, NR2F1, OSR2, OTX1, OVOL1, PA2G4, PATZ1, PAX9, PAX9, PBX4, PGR, PITX1, PITX3, POU2F2, POU3F1, POU3F2, POU3F3, POU5F1, PRDM1, PRDM7, PRR12, PRRX1, RBCK1, RHOXF1, RUNX2, SALL3, SIM1, SIX1, SIX6, SKI, SKIL, SKOR1, SMAD2, SMAD5, SMYD3, SNAPC2, SOX1, SOX14, SOX30, SOX5, SOX6, SP2, SP3, SP5, SP8, SP9, SPIB, STAT5B, T, TBPL1, TBX5, TBX6, TCF12, TCF23, TCF3, TFAP2A, TFAP2E, TFDP2, TFDP3, TGIF2, TGIF2LX, THAP6, THRA, TIGD1, TIGD3, TIGD5, TLX3, TOX, TOX2, TRIM27, TRIM27, TRIM40, TRIM52, TSHZ2, VAX1, VEGFA, VSX1, WNT1, WNT3A, YBX1, YY1, YY2, ZBED5, ZBTB2, ZBTB21, ZBTB38, ZBTB4, ZBTB40, ZBTB42, ZBTB49, ZBTB7B, ZBTB7C, ZBTB8B, ZBTB9, ZC3H8, ZEB2, ZFHX2, ZFHX3, ZFP28, ZFP41, ZFP69B, ZFP90, ZGLP1, ZHX3, ZIC5, ZKSCAN1, ZKSCAN2, ZKSCAN7, ZNF107, ZNF121, ZNF132, ZNF135, ZNF140, ZNF141, ZNF222, ZNF225, ZNF229, ZNF230, ZNF248, ZNF25, ZNF26, ZNF267, ZNF280C, ZNF281, ZNF283, ZNF286B, ZNF304, ZNF317, ZNF318, ZNF320, ZNF33B, ZNF346, ZNF358, ZNF367, ZNF382, ZNF383, ZNF385B, ZNF391, ZNF415, ZNF423, ZNF43, ZNF432, ZNF433, ZNF436, ZNF441, ZNF443, ZNF461, ZNF462, ZNF468, ZNF473, ZNF483, ZNF486, ZNF491, ZNF507, ZNF514, ZNF519, ZNF540, ZNF543, ZNF546, ZNF549, ZNF555, ZNF562, ZNF567, ZNF569, ZNF574, ZNF577, ZNF596, ZNF610, ZNF616, ZNF621, ZNF626, ZNF627, ZNF629, ZNF630, ZNF630, ZNF641, ZNF645, ZNF658, ZNF660, ZNF662, ZNF677, ZNF682, ZNF697, ZNF703, ZNF705A, ZNF705B, ZNF705G, ZNF716, ZNF729, ZNF750, ZNF75A, ZNF765, ZNF771, ZNF773, ZNF774, ZNF778, ZNF784, ZNF789, ZNF804B, ZNF816, ZNF823, ZNF83, ZNF831, ZNF846, ZNF852, ZNF879, ZNF91, ZNF93, ZNF99, ZNF99, ZSCAN16, ZSCAN2, ZSCAN21, ZSCAN5A, and ZSCAN5B.

[0048] Also provided herein is a guide RNA (gRNA) that binds a target site in a gene or regulatory DNA element thereof in a T cell, wherein reduced transcription of the gene, when targeted by an epigenetic-modifying DNA-targeting system comprising the gRNA, promotes a stem cell-like memory T cell phenotype, and wherein the gene is selected from the list consisting of: BMP4, E2F7, ESRRG, LYL1, STAT5A, THAP10, ZNF362, ZSCAN1, ANHX, CPEB1, CSRNP1, EN2, EPAS1, IRX3, LHX8, NR5A2, PRDM16, RAX2, SCML4, SMAD1, SOX6, SUV39H1, TFDP1, ZNF287, ZNF438, ZNF681, ZNF853, BMP4, CARF, ESRRG, ESRRG, FOXR2, HOXA7, IRF9, KAT5, KLF5, NEUROD1, PAX6, PIN1, PURG, RARA, SNAPC5, STAT5A, TBX22, WT1, ZNF138, ZNF143, ZNF205, ZNF235, ZNF526, ZNF548, ZNF559, ZNF611, ZNF655, ZNF672, ZNF699, ZNF706, ZNF714, ZNF772, ZNF782, ZSCAN1, ZSCAN26, ADNP, AHRR, AKNA, ALX3, ALX4, AR, ARHGAP35, ARID3C, ARID5B, ASCL5, ATF6B, ATOH7, BARHL1, BARHL2, BATF, BBX, BHLHE40, BNC2, BRD4, BRD9, BSX, CCDC17, CDX1, CDX2, CDX4, CEBPB, CENPB, CLOCK, CREB3, CREB3L4, CSRNP3, CTCF, CUX1, CUX2, DACH2, DLX1, DLX4, DLX5, DLX6, DMRTB1, DNMT3B, DOTIL, DPF1, DR1, E2F2, E2F3, EBF3, EGR2, EHF, ELF5, ELMSAN1, EMX1, ETS2, ETV4, ETV4, ETV6, EZH1, FERD3L, FERD3L, FIZ1, FOS, FOSB, FOXA1, FOXA2, FOXA3, FOXC2, FOXD3, FOXE1, FOXJ3, FOXN2, FOXN4, FOXO1, FOXP3, FOXS1, GATA2, GATA3, GATAD2A, GCM2, GFI1, GLI2, GLYR1, GPBP1L1, GRHL1, GTF2B, GTF2I, HDAC2, HES2, HES7, HESX1, HEY1, HIF3A, HIVEP3, HLF, HLX, HMG20A, HMGA2, HMGN3, HMX2, HNF1A, HNF4G, HOXA1, HOXA11, HOXB1, HOXB2, HOXB3, HOXC12, HOXC9, HOXC9, HOXD9, HSF4, HSF5, IKZF1, IKZF2, IKZF3, IKZF4, IRF7, IRX3, ISL2, JRK, JRKL, KAT7, KDM1A, KDM2B, KDM5D, KLF14, KLF9, KMT2B, L3MBTL4, LEF1, LHX6, LHX9, LIN28A, LIN28A, LMX1A, MAF, MAFF, MBD3, MBD4, MBNL2, MED1, MED14, MED23, MED24, MEF2C, MEF2D, MEIS3, MESP1, MGA, MITF, MLX, MNX1, MYF5, MYOG, MYPOP, MYRFL, MYT1L, NCOR1, NEUROG1, NFAT5, NFATC2, NFATC3, NFE2L1, NFE2L3, NFIA, NFYB, NKX1-2, NKX2-3, NKX2-4, NKX2-5, NOTCH3, NOTO, NR1H2, NR1H4, NR112, NR2C2, NR2F1, OSR2, OTX1, OVOL1, PA2G4, PATZ1, PAX9, PAX9, PBX4, PGR, PITX1, PITX3, POU2F2, POU3F1, POU3F2, POU3F3, POU5F1, PRDM1, PRDM7, PRR12, PRRX1, RBCK1, RHOXF1, RUNX2, SALL3, SIM1, SIX1, SIX6, SKI, SKIL, SKOR1, SMAD2, SMAD5, SMYD3, SNAPC2, SOX1, SOX14, SOX30, SOX5, SOX6, SP2, SP3, SP5, SP8, SP9, SPIB, STAT5B, T, TBPL1, TBX5, TBX6, TCF12, TCF23, TCF3, TFAP2A, TFAP2E, TFDP2, TFDP3, TGIF2, TGIF2LX, THAP6, THRA, TIGD1, TIGD3, TIGD5, TLX3, TOX, TOX2, TRIM27, TRIM27, TRIM40, TRIM52, TSHZ2, VAX1, VEGFA, VSX1, WNT1, WNT3A, YBX1, YY1, YY2, ZBED5, ZBTB2, ZBTB21, ZBTB38, ZBTB4, ZBTB40, ZBTB42, ZBTB49, ZBTB7B, ZBTB7C, ZBTB8B, ZBTB9, ZC3H8, ZEB2, ZFHX2, ZFHX3, ZFP28, ZFP41, ZFP69B, ZFP90, ZGLP1, ZHX3, ZIC5, ZKSCAN1, ZKSCAN2, ZKSCAN7, ZNF107, ZNF121, ZNF132, ZNF135, ZNF140, ZNF141, ZNF222, ZNF225, ZNF229, ZNF230, ZNF248, ZNF25, ZNF26, ZNF267, ZNF280C, ZNF281, ZNF283, ZNF286B, ZNF304, ZNF317, ZNF318, ZNF320, ZNF33B, ZNF346, ZNF358, ZNF367, ZNF382, ZNF383, ZNF385B, ZNF391, ZNF415, ZNF423, ZNF43, ZNF432, ZNF433, ZNF436, ZNF441, ZNF443, ZNF461, ZNF462, ZNF468, ZNF473, ZNF483, ZNF486, ZNF491, ZNF507, ZNF514, ZNF519, ZNF540, ZNF543, ZNF546, ZNF549, ZNF555, ZNF562, ZNF567, ZNF569, ZNF574, ZNF577, ZNF596, ZNF610, ZNF616, ZNF621, ZNF626, ZNF627, ZNF629, ZNF630, ZNF630, ZNF641, ZNF645, ZNF658, ZNF660, ZNF662, ZNF677, ZNF682, ZNF697, ZNF703, ZNF705A, ZNF705B, ZNF705G, ZNF716, ZNF729, ZNF750, ZNF75A, ZNF765, ZNF771, ZNF773, ZNF774, ZNF778, ZNF784, ZNF789, ZNF804B, ZNF816, ZNF823, ZNF83, ZNF831, ZNF846, ZNF852, ZNF879, ZNF91, ZNF93, ZNF99, ZNF99, ZSCAN16, ZSCAN2, ZSCAN21, ZSCAN5A, and ZSCAN5B.

[0049] In some of any of the provided embodiments, the target site is in a regulatory DNA element and the regulatory DNA element is an enhancer or a promoter.

[0050] In some of any of the provided embodiments, the target site comprises the sequence set forth in any one of SEQ ID NOS: 1-484, a contiguous portion thereof of at least 14 nucleotides (nt), or a complementary sequence of any of the foregoing.

[0051] In some of any of the provided embodiments, the gRNA comprises a gRNA spacer sequence comprising the sequence set forth in SEQ ID NO: 485-968, or a contiguous portion thereof of at least 14 nt. In some of any of the provided embodiments, the gRNA further comprises the sequence set forth in SEQ ID NO: 1454.

[0052] In some of any of the provided embodiments, the gRNA comprises a gRNA that comprises the sequence set forth in any one of SEQ ID NOS: 969-1452, optionally wherein the at least one gRNA is the gRNA set forth in any one of SEQ ID NOS: 969-1452.

[0053] In some of any of the provided embodiments, the gene is selected from the list consisting of: BMP4, E2F7, ESRRG, LYL1, STAT5A, THAP10, ZNF362, ZSCAN1, ANHX, CPEB1, CSRNP1, EN2, EPAS1, IRX3, LHX8, NR5A2, PRDM16, RAX2, SCML4, SMAD1, SOX6, SUV39H1, TFDP1, ZNF287, ZNF438, ZNF681, and ZNF853.

[0054] In some of any of the provided embodiments, the target site comprises the sequence set forth in any one of SEQ ID NOS: 1-27, a contiguous portion thereof of at least 14 nucleotides (nt), or a complementary sequence of any of the foregoing.

[0055] In some of any of the provided embodiments, the gRNA comprises a gRNA spacer sequence comprising the sequence set forth in SEQ ID NO: 485-511, or a contiguous portion thereof of at least 14 nt. In some of any of the provided embodiments, the at least one gRNA further comprises the sequence set forth in SEQ ID NO: 1454.

[0056] In some of any of the provided embodiments, the gRNA comprises a gRNA that comprises the sequence set forth in any one of SEQ ID NOS: 969-995, optionally wherein the at least one gRNA is the gRNA set forth in any one of SEQ ID NOS: 969-995.

[0057] In some of any of the provided embodiments, the gene is selected from the list consisting of: BMP4, E2F7, ESRRG, LYL1, STAT5A, THAP10, ZNF362, and ZSCAN1.

[0058] In some of any of the provided embodiments, the target site comprises the sequence set forth in any one of SEQ ID NOS: 1-8, a contiguous portion thereof of at least 14 nucleotides (nt), or a complementary sequence of any of the foregoing.

[0059] In some of any of the provided embodiments, the gRNA comprises a gRNA spacer sequence comprising the sequence set forth in SEQ ID NO: 485-492, or a contiguous portion thereof of at least 14 nt.

[0060] In some of any of the provided embodiments, the gRNA further comprises the sequence set forth in SEQ ID NO: 1454.

[0061] In some of any of the provided embodiments, the at least one gRNA comprises a gRNA that comprises the sequence set forth in any one of SEQ ID NOS: 969-976, optionally wherein the at least one gRNA is the gRNA set forth in any one of SEQ ID NOS: 969-976.

[0062] In some of any of the provided embodiments, the gRNA spacer sequence is between 14 nt and 24 nt, or between 16 nt and 22 nt in length.

[0063] In some of any of the provided embodiments, the gRNA spacer sequence is 18 nt, 19 nt, 20 nt, 21 nt or 22 nt in length.

[0064] In some of any of the provided embodiments, the gRNA comprises modified nucleotides for increased stability.

[0065] In some of any of the provided embodiments, the gRNA is capable of complexing with a Cas protein or variant thereof.

[0066] In some of any of the provided embodiments, the gRNA is capable of hybridizing to the target site or is complementary to the target site.

[0067] Also provided herein is a CRISPR Cas-guide RNA (gRNA) combination comprising: (a) a Clustered Regularly Interspaced Short Palindromic Repeats associated (Cas) protein or variant thereof; and (b) at least one gRNA of any of claims 53-78 that targets the Cas protein or variant thereof to a target site in a gene or regulatory DNA element thereof of a T cell.

[0068] In some of any of the provided embodiments, the Cas protein or a variant thereof is a Cas9 protein or a variant thereof. In some of any of the provided embodiments, the Cas protein or a variant thereof is a variant Cas protein, wherein the variant Cas protein lacks nuclease activity or is a deactivated Cas (dCas) protein. In some of any of the provided embodiments, the variant Cas protein is a variant Cas9 protein that lacks nuclease activity or that is a deactivated Cas9 (dCas9) protein. In some of any of the provided embodiments, the Cas9 protein or a variant thereof is a Staphylococcus aureus Cas9 (SaCas9) protein or a variant thereof. In some of any of the provided embodiments, the variant Cas9 is a Staphylococcus aureus dCas9 protein (dSaCas9) that comprises at least one amino acid mutation selected from D10A and N580A, with reference to numbering of positions of SEQ ID NO: 1461. In some of any of the provided embodiments, the variant Cas9 protein comprises the sequence set forth in SEQ ID NO: 1462, or an amino acid sequence that has at least 90%, 91%, 92%, 93%, 94%, 95%, 96%, 97%, 98%, or 99% sequence identity thereto. In some of any of the provided embodiments, the Cas9 protein or variant thereof is a Streptococcus pyogenes Cas9 (SpCas9) protein or a variant thereof. In some of any of the provided embodiments, the variant Cas9 is a Streptococcus pyogenes dCas9 (dSpCas9) protein that comprises at least one amino acid mutation selected from D10A and H840A, with reference to numbering of positions of SEQ ID NO: 1463. In some of any of the provided embodiments, the variant Cas9 protein comprises the sequence set forth in SEQ ID NO: 1464, or an amino acid sequence that has at least 90%, 91%, 92%, 93%, 94%, 95%, 96%, 97%, 98%, or 99% sequence identity thereto.

[0069] Also provided herein are polynucleotides encoding the DNA-targeting system of any of the provided embodiments, fusion protein of the DNA-targeting system of any of the provided embodiments, gRNAs of any of the provided embodiments, CRISPR Cas-gRNA combinations of any of the provided embodiments, portions or components of any of the foregoing.

[0070] Also provided herein are a plurality of polynucleotides of any of the provided embodiments, fusion protein of the DNA-targeting system of any of the provided embodiments, gRNAs of any of the provided embodiments, CRISPR Cas-gRNA combinations of any of the provided embodiments, portions or components of any of the foregoing.

[0071] In some of any of the provided embodiments, is a vector comprising the polynucleotide disclosed herein. In some of any of the provided embodiments, is a vector comprising the plurality of polynucleotides disclosed herein.

[0072] In some of any of the provided embodiments, the vector is a viral vector. In some of any of the provided embodiments, the vector is an adeno-associated virus (AAV) vector. In some of any of the provided embodiments, the vector is selected from among AAV1, AAV2, AAV3, AAV4, AAV5, AAV6, AAV7, AAV8, or AAV9.

[0073] In some of any of the provided embodiments, the vector is a lentiviral vector.

[0074] In some of any of the provided embodiments, the vector is a non-viral vector. In some of any of the provided embodiments, the non-viral vector is selected from: a lipid nanoparticle, a liposome, an exosome, or a cell penetrating peptide.

[0075] In some of any of the provided embodiments, the vector exhibits immune cell or T-cell tropism.

[0076] In some of any of the provided embodiments, the vector comprises one vector, or two or more vectors.

[0077] Also provided herein are modified T cell comprising any of the DNA-targeting system disclosed herein, any of the gRNA disclosed herein, any of the CRISPR Cas-gRNA combinations disclosed herein, any of the polynucleotides disclosed herein, any of the plurality of polynucleotides disclosed herein, any of the vectors disclosed herein, any portion or a component of any of the foregoing.

[0078] Also provided herein is a modified T cell comprising an epigenetic or phenotypic modification resulting from being contacted by any of the DNA-targeting system disclosed herein, any of the gRNAs disclosed herein, any of the CRISPR Cas-gRNA combinations disclosed herein, any of the polynucleotides disclosed herein, any of the plurality of polynucleotides disclosed herein, any of the vectors disclosed herein, any portion or a component of any of the foregoing.

[0079] In some of any of the provided embodiments, the modified T cell exhibits reduced transcription of one or more genes whose transcriptional repression promotes a stem cell-like memory T-cell phenotype, in comparison to a comparable unmodified T cell.

[0080] In some of any of the provided embodiments, the one or more genes are selected from the list consisting of: BMP4, E2F7, ESRRG, LYL1, STAT5A, THAP10, ZNF362, ZSCAN1, ANHX, CPEB1, CSRNP1, EN2, EPAS1, IRX3, LHX8, NR5A2, PRDM16, RAX2, SCML4, SMAD1, SOX6, SUV39H1, TFDP1, ZNF287, ZNF438, ZNF681, ZNF853, BMP4, CARF, ESRRG, ESRRG, FOXR2, HOXA7, IRF9, KAT5, KLF5, NEUROD1, PAX6, PIN1, PURG, RARA, SNAPC5, STAT5A, TBX22, WT1, ZNF138, ZNF143, ZNF205, ZNF235, ZNF526, ZNF548, ZNF559, ZNF611, ZNF655, ZNF672, ZNF699, ZNF706, ZNF714, ZNF772, ZNF782, ZSCAN1, ZSCAN26, ADNP, AHRR, AKNA, ALX3, ALX4, AR, ARHGAP35, ARID3C, ARID5B, ASCL5, ATF6B, ATOH7, BARHL1, BARHL2, BATF, BBX, BHLHE40, BNC2, BRD4, BRD9, BSX, CCDC17, CDX1, CDX2, CDX4, CEBPB, CENPB, CLOCK, CREB3, CREB3L4, CSRNP3, CTCF, CUX1, CUX2, DACH2, DLX1, DLX4, DLX5, DLX6, DMRTB1, DNMT3B, DOTIL, DPF1, DR1, E2F2, E2F3, EBF3, EGR2, EHF, ELF5, ELMSAN1, EMX1, ETS2, ETV4, ETV4, ETV6, EZH1, FERD3L, FERD3L, FIZ1, FOS, FOSB, FOXA1, FOXA2, FOXA3, FOXC2, FOXD3, FOXE1, FOXJ3, FOXN2, FOXN4, FOXO1, FOXP3, FOXS1, GATA2, GATA3, GATAD2A, GCM2, GFI1, GLI2, GLYR1, GPBP1L1, GRHL1, GTF2B, GTF2I, HDAC2, HES2, HES7, HESX1, HEY1, HIF3A, HIVEP3, HLF, HLX, HMG20A, HMGA2, HMGN3, HMX2, HNF1A, HNF4G, HOXA1, HOXA11, HOXB1, HOXB2, HOXB3, HOXC12, HOXC9, HOXC9, HOXD9, HSF4, HSF5, IKZF1, IKZF2, IKZF3, IKZF4, IRF7, IRX3, ISL2, JRK, JRKL, KAT7, KDM1A, KDM2B, KDM5D, KLF14, KLF9, KMT2B, L3MBTL4, LEF1, LHX6, LHX9, LIN28A, LIN28A, LMX1A, MAF, MAFF, MBD3, MBD4, MBNL2, MED1, MED14, MED23, MED24, MEF2C, MEF2D, MEIS3, MESP1, MGA, MITF, MLX, MNX1, MYF5, MYOG, MYPOP, MYRFL, MYT1L, NCOR1, NEUROG1, NFAT5, NFATC2, NFATC3, NFE2L1, NFE2L3, NFIA, NFYB, NKX1-2, NKX2-3, NKX2-4, NKX2-5, NOTCH3, NOTO, NR1H2, NR1H4, NR112, NR2C2, NR2F1, OSR2, OTX1, OVOL1, PA2G4, PATZ1, PAX9, PAX9, PBX4, PGR, PITX1, PITX3, POU2F2, POU3F1, POU3F2, POU3F3, POU5F1, PRDM1, PRDM7, PRR12, PRRX1, RBCK1, RHOXF1, RUNX2, SALL3, SIM1, SIX1, SIX6, SKI, SKIL, SKOR1, SMAD2, SMAD5, SMYD3, SNAPC2, SOX1, SOX14, SOX30, SOX5, SOX6, SP2, SP3, SP5, SP8, SP9, SPIB, STAT5B, T, TBPL1, TBX5, TBX6, TCF12, TCF23, TCF3, TFAP2A, TFAP2E, TFDP2, TFDP3, TGIF2, TGIF2LX, THAP6, THRA, TIGD1, TIGD3, TIGD5, TLX3, TOX, TOX2, TRIM27, TRIM27, TRIM40, TRIM52, TSHZ2, VAX1, VEGFA, VSX1, WNT1, WNT3A, YBX1, YY1, YY2, ZBED5, ZBTB2, ZBTB21, ZBTB38, ZBTB4, ZBTB40, ZBTB42, ZBTB49, ZBTB7B, ZBTB7C, ZBTB8B, ZBTB9, ZC3H8, ZEB2, ZFHX2, ZFHX3, ZFP28, ZFP41, ZFP69B, ZFP90, ZGLP1, ZHX3, ZIC5, ZKSCAN1, ZKSCAN2, ZKSCAN7, ZNF107, ZNF121, ZNF132, ZNF135, ZNF140, ZNF141, ZNF222, ZNF225, ZNF229, ZNF230, ZNF248, ZNF25, ZNF26, ZNF267, ZNF280C, ZNF281, ZNF283, ZNF286B, ZNF304, ZNF317, ZNF318, ZNF320, ZNF33B, ZNF346, ZNF358, ZNF367, ZNF382, ZNF383, ZNF385B, ZNF391, ZNF415, ZNF423, ZNF43, ZNF432, ZNF433, ZNF436, ZNF441, ZNF443, ZNF461, ZNF462, ZNF468, ZNF473, ZNF483, ZNF486, ZNF491, ZNF507, ZNF514, ZNF519, ZNF540, ZNF543, ZNF546, ZNF549, ZNF555, ZNF562, ZNF567, ZNF569, ZNF574, ZNF577, ZNF596, ZNF610, ZNF616, ZNF621, ZNF626, ZNF627, ZNF629, ZNF630, ZNF630, ZNF641, ZNF645, ZNF658, ZNF660, ZNF662, ZNF677, ZNF682, ZNF697, ZNF703, ZNF705A, ZNF705B, ZNF705G, ZNF716, ZNF729, ZNF750, ZNF75A, ZNF765, ZNF771, ZNF773, ZNF774, ZNF778, ZNF784, ZNF789, ZNF804B, ZNF816, ZNF823, ZNF83, ZNF831, ZNF846, ZNF852, ZNF879, ZNF91, ZNF93, ZNF99, ZNF99, ZSCAN16, ZSCAN2, ZSCAN21, ZSCAN5A, and ZSCAN5B.

[0081] In some of any of the provided embodiments, the one or more genes are selected from the list consisting of: BMP4, E2F7, ESRRG, LYL1, STAT5A, THAP10, ZNF362, ZSCAN1, ANHX, CPEB1, CSRNP1, EN2, EPAS1, IRX3, LHX8, NR5A2, PRDM16, RAX2, SCML4, SMAD1, SOX6, SUV39H1, TFDP1, ZNF287, ZNF438, ZNF681, and ZNF853.

[0082] In some of any of the provided embodiments, the one or more genes are selected from the list consisting of: BMP4, E2F7, ESRRG, LYL1, STAT5A, THAP10, ZNF362, and ZSCAN1.

[0083] In some of any of the provided embodiments, the transciption is reduced by at least about 1.2-fold, 1.25-fold, 1.3-fold, 1.4-fold, 1.5-fold, 1.6-fold, 1.7-fold, 1.75-fold, 1.8-fold, 1.9-fold, 2-fold, 2.5-fold, 3-fold, 4-fold, or 5-fold.

[0084] In some of any of the provided embodiments, the modified T cell exhibits a stem cell-like memory T-cell phenotype.

[0085] In some of any of the provided embodiments, the stem cell-like memory T cell phenotype comprises expression of CCR7 and/or CD27. In some of any of the provided embodiments, the stem cell-like memory T cell phenotype comprises expression of CCR7 and CD27.

[0086] In some of any of the provided embodiments, the stem cell-like memory T cell phenotype comprises one or more cell-surface markers selected from CCR7+, CD27+, CD45RA+, CD45RO−, CCR7+, CD62L+, CD28+, CD27+, IL-7Rα+, CXCR3+, CD95+, CD11a+, IL-2Rβ+, CD58+, and CD57−.

[0087] In some of any of the provided embodiments, the modified T cell is capable of a stronger and/or more persistent immune response, in comparison to a comparable unmodified T cell.

[0088] In some of any of the provided embodiments, the modified T cell is characterized by polyfunctional activity of the T cells to produce two or more cytokines following stimulation of T cells with a stimulatory agent, optionally wherein the two or more cytokines are selected from among interferon-gamma (IFN-gamma), interleukin 2 (IL-2) and TNF-alpha.

[0089] In some of any of the provided embodiments, the modified T cell is derived from a cell from a subject.

[0090] In some of any of the provided embodiments, the modified T cell is derived from a primary T cell.

[0091] In some of any of the provided embodiments, the modified T cell is derived from a T cell progenitor, a pluripotent stem cell, or an induced pluripotent stem cell.

[0092] In some of any of the provided embodiments, the modified T cell further comprises an engineered T cell receptor (eTCR) or chimeric antigen receptor (CAR).

[0093] Also provided herein is a method of reducing the transcription of one or more genes in a T cell, the method comprising introducing into a T cell any of the DNA-targeting systems disclosed herein, any of the gRNAs disclosed herein, any of the CRISPR Cas-gRNA combinations disclosed herein, any of the polynucleotides disclosed herein, any of the plurality of polynucleotides disclosed herein, any of the vectors disclosed herein, any portion or a component of any of the foregoing.

[0094] In some of any of the provided embodiments, the one or more genes is a gene epigenetically modified by the DNA-targeting system.

[0095] In some of any of the provided embodiments, the transcription of the one or more genes is reduced in comparison to a comparable T cell not subjected to the method.

[0096] In some of any of the provided embodiments, the transcription of the one or more genes is reduced by at least about 1.2-fold, 1.25-fold, 1.3-fold, 1.4-fold, 1.5-fold, 1.6-fold, 1.7-fold, 1.75-fold, 1.8-fold, 1.9-fold, 2-fold, 2.5-fold, 3-fold, 4-fold, or 5-fold.

[0097] In some of any of the provided embodiments, the reduced transcription of the one or more genes promotes a stem cell-like memory T cell phenotype in the T cell.

[0098] Also provided herein are methods of promoting a stem cell-like memory T cell phenotype in a T cell, the method comprising introducing into the T cell any of the DNA-targeting system disclosed herein, any of the gRNA disclosed herein, any of the CRISPR Cas-gRNA combinations disclosed herein, any of the polynucleotides disclosed herein, any of the plurality of polynucleotides disclosed herein, any of the vectors disclosed herein, any portions or components of any of the foregoing. In some of any of the provided embodiments, the stem cell-like memory T cell phenotype comprises one or more cell-surface markers selected from CCR7+, CD27+, CD45RA+, CD45RO−, CCR7+, CD62L+, CD28+, CD27+, IL-7Rα+, CXCR3+, CD95+, CD11a+, IL-2Rβ+, CD58+, and CD57−. In some of any of the provided embodiments, the stem cell-like memory T cell phenotype comprises expression of CCR7 and/or CD27.

[0099] In some of any of the provided embodiments, the stem cell-like memory T cell phenotype is characterized by polyfunctional activity of the T cell to produce two or more cytokines following stimulation of the T cell with a stimulatory agent, optionally wherein the two or more cytokines are selected from among interferon-gamma (IFN-gamma), interleukin 2 (IL-2), and TNF-alpha.

[0100] In some of any of the provided embodiments, the T cell is a T cell in a subject and the method is carried out in vivo.

[0101] In some of any of the provided embodiments, the T cell is a T cell from a subject, or derived from a cell from the subject, and the method is carried out ex vivo.

[0102] In some of any of the provided embodiments, the T cell is a primary T cell.

[0103] In some of any of the provided embodiments, the T cell is derived from a T cell progenitor, a pluripotent stem cell, or an induced pluripotent stem cell.

[0104] Also provided herein is a modified T cell produced by any of the methods disclosed herein.

[0105] Also provided herein is a method of cell therapy for treating a disease in a subject in need thereof, comprising administering to the subject a cellular composition that comprises the modified T cell disclosed herein.

[0106] In some of any of the provided embodiments, the modified T cell is obtained from or derived from a cell from said subject in need thereof.

[0107] In some of any of the provided embodiments, the subject is a first subject, and the modified T cell is obtained from or derived from a cell from a second subject.

[0108] In some of any of the provided embodiments, the subject in need thereof is a human.

[0109] In some of any of the provided embodiments, the administered modified T cell exhibits a stronger and/or more persistent immune response in the subject, in comparison to a comparable unmodified T cell.

[0110] In some of any of the provided embodiments, the subject has or is suspected of having a disease, condition, or disorder, optionally wherein the disease, condition, or disorder is cancer, viral infection, autoimmune disease, or graft-versus-host disease, or the subject has undergone or is expected to undergo organ transplantation. In some of any of the provided embodiments, the subject has or is suspected of having cancer.

[0111] Also provided herein is a pharmaceutical composition comprising the modified T cell disclosed herein.

[0112] Also provided herein, is a pharmaceutical composition comprising any of the DNA-targeting system disclosed herein, any of the gRNA disclosed herein, any of the CRISPR Cas-gRNA combinations disclosed herein, any of the polynucleotides disclosed herein, any of the plurality of polynucleotides disclosed herein, any of the vectors disclosed herein, or a portion or a component of any of the foregoing.

[0113] In some of any of the provided embodiments, the pharmaceutical composition is used in treating a disease, condition, or disorder in a subject.

[0114] In some of any of the provided embodiments, the pharmaceutical composition is used in the manufacture of a medicament for treating a disease, condition, or disorder in a subject.

[0115] In some of any of the provided embodiments, the subject has or is suspected of having a disease, condition, or disorder, optionally wherein the disease, condition, or disorder is cancer, viral infection, autoimmune disease, or graft-versus-host disease, or the subject has undergone or is expected to undergo organ transplantation. In some of any of the provided embodiments, the subject has or is suspected of having cancer.

[0116] In some of any of the provided embodiments, the pharmaceutical composition is to be administered to the subject in vivo.

[0117] In some of any of the provided embodiments, the subject is a first subject, and the pharmaceutical composition is to be administered ex vivo to T cells from the first subject, or to T cells from a second subject. In some of any of the provided embodiments, following administration to T cells from the first subject or second subject, the T cells are administered to the first subject. In some of any of the provided embodiments, following administration of the pharmaceutical composition, the expression of one or more genes is reduced in T cells of the subject. In some of any of the provided embodiments, following administration of the pharmaceutical composition to the T cells from the first or second subject, the expression of one or more genes is reduced in the T cells.

[0118] In some of any of the provided embodiments, the one or more genes are selected from the list consisting of: BMP4, E2F7, ESRRG, LYL1, STAT5A, THAP10, ZNF362, ZSCAN1, ANHX, CPEB1, CSRNP1, EN2, EPAS1, IRX3, LHX8, NR5A2, PRDM16, RAX2, SCML4, SMAD1, SOX6, SUV39H1, TFDP1, ZNF287, ZNF438, ZNF681, ZNF853, BMP4, CARF, ESRRG, ESRRG, FOXR2, HOXA7, IRF9, KAT5, KLF5, NEUROD1, PAX6, PIN1, PURG, RARA, SNAPC5, STAT5A, TBX22, WT1, ZNF138, ZNF143, ZNF205, ZNF235, ZNF526, ZNF548, ZNF559, ZNF611, ZNF655, ZNF672, ZNF699, ZNF706, ZNF714, ZNF772, ZNF782, ZSCAN1, ZSCAN26, ADNP, AHRR, AKNA, ALX3, ALX4, AR, ARHGAP35, ARID3C, ARID5B, ASCL5, ATF6B, ATOH7, BARHL1, BARHL2, BATF, BBX, BHLHE40, BNC2, BRD4, BRD9, BSX, CCDC17, CDX1, CDX2, CDX4, CEBPB, CENPB, CLOCK, CREB3, CREB3L4, CSRNP3, CTCF, CUX1, CUX2, DACH2, DLX1, DLX4, DLX5, DLX6, DMRTB1, DNMT3B, DOTIL, DPF1, DR1, E2F2, E2F3, EBF3, EGR2, EHF, ELF5, ELMSAN1, EMX1, ETS2, ETV4, ETV4, ETV6, EZH1, FERD3L, FERD3L, FIZ1, FOS, FOSB, FOXA1, FOXA2, FOXA3, FOXC2, FOXD3, FOXE1, FOXJ3, FOXN2, FOXN4, FOXO1, FOXP3, FOXS1, GATA2, GATA3, GATAD2A, GCM2, GFI1, GLI2, GLYR1, GPBP1L1, GRHL1, GTF2B, GTF2I, HDAC2, HES2, HES7, HESX1, HEY1, HIF3A, HIVEP3, HLF, HLX, HMG20A, HMGA2, HMGN3, HMX2, HNF1A, HNF4G, HOXA1, HOXA11, HOXB1, HOXB2, HOXB3, HOXC12, HOXC9, HOXC9, HOXD9, HSF4, HSF5, IKZF1, IKZF2, IKZF3, IKZF4, IRF7, IRX3, ISL2, JRK, JRKL, KAT7, KDM1A, KDM2B, KDM5D, KLF14, KLF9, KMT2B, L3MBTL4, LEF1, LHX6, LHX9, LIN28A, LIN28A, LMX1A, MAF, MAFF, MBD3, MBD4, MBNL2, MED1, MED14, MED23, MED24, MEF2C, MEF2D, MEIS3, MESP1, MGA, MITF, MLX, MNX1, MYF5, MYOG, MYPOP, MYRFL, MYT1L, NCOR1, NEUROG1, NFAT5, NFATC2, NFATC3, NFE2L1, NFE2L3, NFIA, NFYB, NKX1-2, NKX2-3, NKX2-4, NKX2-5, NOTCH3, NOTO, NR1H2, NR1H4, NR112, NR2C2, NR2F1, OSR2, OTX1, OVOL1, PA2G4, PATZ1, PAX9, PAX9, PBX4, PGR, PITX1, PITX3, POU2F2, POU3F1, POU3F2, POU3F3, POU5F1, PRDM1, PRDM7, PRR12, PRRX1, RBCK1, RHOXF1, RUNX2, SALL3, SIM1, SIX1, SIX6, SKI, SKIL, SKOR1, SMAD2, SMAD5, SMYD3, SNAPC2, SOX1, SOX14, SOX30, SOX5, SOX6, SP2, SP3, SP5, SP8, SP9, SPIB, STAT5B, T, TBPL1, TBX5, TBX6, TCF12, TCF23, TCF3, TFAP2A, TFAP2E, TFDP2, TFDP3, TGIF2, TGIF2LX, THAP6, THRA, TIGD1, TIGD3, TIGD5, TLX3, TOX, TOX2, TRIM27, TRIM27, TRIM40, TRIM52, TSHZ2, VAX1, VEGFA, VSX1, WNT1, WNT3A, YBX1, YY1, YY2, ZBED5, ZBTB2, ZBTB21, ZBTB38, ZBTB4, ZBTB40, ZBTB42, ZBTB49, ZBTB7B, ZBTB7C, ZBTB8B, ZBTB9, ZC3H8, ZEB2, ZFHX2, ZFHX3, ZFP28, ZFP41, ZFP69B, ZFP90, ZGLP1, ZHX3, ZIC5, ZKSCAN1, ZKSCAN2, ZKSCAN7, ZNF107, ZNF121, ZNF132, ZNF135, ZNF140, ZNF141, ZNF222, ZNF225, ZNF229, ZNF230, ZNF248, ZNF25, ZNF26, ZNF267, ZNF280C, ZNF281, ZNF283, ZNF286B, ZNF304, ZNF317, ZNF318, ZNF320, ZNF33B, ZNF346, ZNF358, ZNF367, ZNF382, ZNF383, ZNF385B, ZNF391, ZNF415, ZNF423, ZNF43, ZNF432, ZNF433, ZNF436, ZNF441, ZNF443, ZNF461, ZNF462, ZNF468, ZNF473, ZNF483, ZNF486, ZNF491, ZNF507, ZNF514, ZNF519, ZNF540, ZNF543, ZNF546, ZNF549, ZNF555, ZNF562, ZNF567, ZNF569, ZNF574, ZNF577, ZNF596, ZNF610, ZNF616, ZNF621, ZNF626, ZNF627, ZNF629, ZNF630, ZNF630, ZNF641, ZNF645, ZNF658, ZNF660, ZNF662, ZNF677, ZNF682, ZNF697, ZNF703, ZNF705A, ZNF705B, ZNF705G, ZNF716, ZNF729, ZNF750, ZNF75A, ZNF765, ZNF771, ZNF773, ZNF774, ZNF778, ZNF784, ZNF789, ZNF804B, ZNF816, ZNF823, ZNF83, ZNF831, ZNF846, ZNF852, ZNF879, ZNF91, ZNF93, ZNF99, ZNF99, ZSCAN16, ZSCAN2, ZSCAN21, ZSCAN5A, and ZSCAN5B.

[0119] In some of any of the provided embodiments, the one or more genes are selected from the list consisting of: BMP4, E2F7, ESRRG, LYL1, STAT5A, THAP10, ZNF362, ZSCAN1, ANHX, CPEB1, CSRNP1, EN2, EPAS1, IRX3, LHX8, NR5A2, PRDM16, RAX2, SCML4, SMAD1, SOX6, SUV39H1, TFDP1, ZNF287, ZNF438, ZNF681, and ZNF853.

[0120] In some of any of the provided embodiments, the one or more genes are selected from the list consisting of: BMP4, E2F7, ESRRG, LYL1, STAT5A, THAP10, ZNF362, and ZSCAN1.

[0121] Also provided herein are methods for treating a disease in a subject in need thereof, comprising administering to the subject any of the DNA-targeting system disclosed herein, any of the gRNAs disclosed herein, any of the CRISPR Cas-gRNA combinations disclosed herein, any of the polynucleotides disclosed herein, any of the plurality of polynucleotides disclosed herein, any of the vectors disclosed herein, any of the modified T cell disclosed herein, any of the pharmaceutical compositions disclosed herein, any portion or component of any of the foregoing.

### BRIEF DESCRIPTION OF THE DRAWINGS

[0122] FIGS. 1A-1C show details of the gRNA screen as described in Example 1. FIG. 1A shows a timeline of the procedures carried out for the screen. FIG. 1B shows expression of cell CD90 in unenriched and CD90-enriched T cells, as assessed by flow cytometry. FIG. 1C shows expression of CCR7 and CD27 in pre-sorted cells and the CCR7+/CD27+ sorted population, as assessed by flow cytometry.

[0123] FIG. 2 shows a volcano plot of results from sequencing analysis in the gRNA screen as described in Example 1. Each point represents a single gRNA; circles represent gene-targeted gRNAs and triangles represent control gRNAs. x-axis represents log 2 fold change of gRNA abundance in the CCR7+/CD27+ population in comparison to the unsorted population. y-axis represents statistical significance of gRNA enrichment or depletion in-log 10 adjusted p-value. gRNAs were significantly depleted (left) or enriched (right) in the CCR7+/CD27+ population, based on a false discovery rate (FDR) of adjusted p-value <0.1 (significance threshold indicated by dashed horizontal line).

### DETAILED DESCRIPTION

[0124] Provided herein is an epigenetic-modifying DNA-targeting system, said DNA-targeting system comprising a fusion protein comprising: (a) a DNA-targeting domain capable of being targeted to a target site in a gene or regulatory DNA element thereof in a T cell; and (b) at least one effector domain capable of reducing or repressing transcription of the gene; wherein reduced or repressed transcription of the gene promotes a stem cell-like memory T-cell (Tscm) phenotype. In some embodiments, the DNA-targeting domain is a nuclease-inactive Clustered Regularly Interspaced Short Palindromic Repeats associated (Cas) protein or variant thereof complexed with a guide RNA (gRNA). Also provided are gRNA for targeting to a target site in a gene or a regulatory DNA element thereof in a T cell, wherein the gene is one in which reduced or repressed transcription of the gene promotes a Tscm phenotype, as well as CRISPR-Cas/gRNA combinations thereof. Also provided herein polynucleotides encoding the DNA-targeting system or the fusion protein of the DNA-targeting system, and vectors and cells containing the same. Also provided herein are methods of using the epigenetic-modifying DNA-targeting system for modulating transcription or phenotype of T cells and the resulting modified cells. The provided embodiments relate to compositions and methods for promoting a Tscm phenotype in a T cell or in one or more T cells in a population by epigenetically modifying target sites in one or more target genes. In some embodiments, the methods can be used in connection with T cell therapies, such as in connection with adoptive T cell therapies.

[0125] The administration of T cells targeting a specific antigen, also known as Adoptive Cell Therapy (ACT), is a promising approach for treating diseases such as cancer. However, current ACT treatments face challenges including suboptimal T cell function, expansion, and persistence. Furthermore, the persistence and functionality of the transferred T cells can significantly differ between different T cell subsets and among T cells from different patients. Recent clinical trials for ACT suggest that the ability to persist long term in the circulation is dependent on the differentiation stage of the T cell, including the ability to retain a network of transcription factors and metabolic regulators (Pilipow K., et. al., Journal of Clinical Investigation Insight 2018; 3 (18): e122299). The T cells transferred into the patient are often terminally differentiated and therefore fail to persist in the long term, ultimately limiting effective anti-tumor response.

[0126] Strategies to mitigate these challenges and enhance the persistence, expansion, and anti-tumor activity of chimeric antigen receptor (CAR) engineered T cells have been tested in preclinical and clinical settings. For instance, strategies for optimizing ex vivo T cell culture conditions, including the addition of cytokines during manufacturing (Besser M. J., Cytotherapy 2009; 11 (2): 206-17), expression of cytokines and/receptors by the CAR T cells (Krenciute G., Cancer Immunol Res. 2017 07; 5 (7): 571-581), use of pharmacological inhibitors during expansion to inhibit signaling pathways such as AKT (Urak R. et. al., Journal of Immunotherapy Cancer 2017 Mar. 21; 5:26) or PI3K (Peterson C. T et. al., Blood Advances 2018 Feb. 13; 2 (3): 210-223), immune-depletion and checkpoint blockade (Cherkassky L. et. al., Journal of clinical investigation 2016 Aug. 1; 126 (8): 3130-44) have been so far explored. However, existing strategies have not been entirely satisfactory. In some cases, concerns regarding cytokine-induced toxicity or the emergence of lymphoproliferative diseases as a result of the above-mentioned strategies have raised questions for alternative approaches.

[0127] Clinical and preclinical results also have established that certain T cell subset with a less differentiated phenotype akin to naïve-like T cells also may lead to greater persistence and functionality. The memory T cell compartment has been conventionally divided into two subsets based on the expression of CD62L and CCR7 (Sallusto F., et. al., Nature 1999 Oct. 14,401 (66754): Jul. 8, 2012). Central memory T cells (Tcm) express high levels of CD62L and CCR7 and are naive-like T cells, while effector memory T cells (Tem) do not express CD62L nor CCR7 and are committed progenitor cells that undergo terminal differentiation. A specialized subset within the naïve-like T cell (Tn) compartment exists that harbors superior multipotent capacities to regenerate central memory (Tcm), effector memory (Tem), and effector T cells (Gattinoni L., et. al., Nature Medicine 2009 July; 15 (7): 808-13, Gattinoni L., et. al., Nature Medicine 2012; 17 (10): 1290-1297). This early differentiated stem cell memory T (Tscm) cell subset expresses CD45RO−, CCR7+, CD45RA+, CD62L+, CD27+, CD28+ and IL-7Rα+ common to the naïve-like T cell compartment and in addition expresses increased levels of CD95, IL-2RB, CXCR3, and LFA-1 with distinctive attributes of conventional memory T cells. Tscm cells represent the least differentiated T-cell memory subset that retains a network of transcription factors and metabolic regulators, responsible for their multipotency and a heightened capacity to self-renew (Pilipow K., et. al., Journal of Clinical Investigation Insight 22018; 3 (18): e122299). Furthermore, the expression of the lymphoid-homing receptor CCR7 facilitates superior migration to secondary lymphoid organs, such as the spleen, which translates into longer persistence and constant replenishment of the circulating T cell pool.

[0128] Preclinical studies using adoptive transfer in tumor-bearing mice suggest that Tscm cells have enhanced proliferative, survival, and long-lasting anti-tumor capacities compared with the conventional Tem and Tem cells (Gattinoni L., et. al., Nature Medicine 2012; 17 (10): 1290-1297). Upon antigenic stimulation and TCR activation the Tscm cells clonally expand and display effector functions. Recent clinical trials using adoptive transfer of autologous T cells expressing CD19-specific chimeric antigen receptors have shown signs of complete regression in patients with lymphoid malignancies (#NCT00586391 and #NCT00709033), and analysis of the patients indicated that the T memory stem cell (or Tscm) subset within the infusion product expressing CD8+CD45RA+CCR7+ was responsible for the in vivo expansion resulting in complete tumor regression (Xu Y., et al., Blood 2014 Jun. 12; 123 (24): 3750-9).

[0129] Tscm cells are rare in the total pool of circulating T cells and therefore there is a need for increasing their numbers. Studies on preclinical mouse models have highlighted the significance of increasing the frequency of these Tscm cells in producing greater anti-tumor activity. In one such study, following repetitive encounters with the antigen and cytokine-mediated expansion, the anti-tumor activity of the Tscm cells correlated with enhanced persistence and increased resistance to cell death (Xu Y., et al., Blood 2014 Jun. 12; 123 (24): 3750-9). However, while the frequency of the CD8+CD45RA+CCR7+ subset doubled, the numbers of CAR+CD4+CD45RA+CCR7+ subset remained low, raising the need for better approaches for improving the Tscm cell numbers in the CAR-T product. Other studies also have demonstrated that CAR-T cells with Tscm properties mediate robust, long-lasting anti-tumor responses (Sabatino M., Blood 2016; 128 (4): 519-528, Capuis A. G., et. al., Proc Natl Acad Scie 2012 Mar. 20; 109 (12): 4592-97, Fraietta J. A., Nature medicine 2018; 24:563-571). However, the rareness of the Tscm cells within the circulating T cell population is a significant hurdle to their use in CAR-T therapy.

[0130] Studies indicate that changes in the epigenetic environment may contribute to favorable outcomes associated with CAR T cell therapy. For instance, an extensive analysis of a patient with advanced refractory CLL undergoing CAR-T therapy showed that a biallelic dysfunction in the epigenetic modifier TET2 gene lead to complete remission (Fraietta J. A., et. al.). The progeny of a single CAR T-cell with the epigenetic modification was sufficient to mediate potent anti-tumor effects.

[0131] The provided embodiments relate to identification of genomic locations that are epigenetically modified in a T cell that has a Tscm phenotype, as demonstrated by assessment for cells surface positive for the exemplary Tscm markers CD27 and CCR7. Targeting such genomic locations would promote or increase the differentiation fate of T cells as Tscm. Thus, the provided embodiments herein relate to identification of target genes that can be epigenetically-modified to promote (i.e. increase) a Tscm phenotype of T cells. In aspects, the provided embodiments include introducing into a T cell epigenetic modifications using effector domains that are repressors of transcription (i.e. transcriptional repressor domains), which can be directed to regions of a target gene (e.g. regulatory elements such as promoters or enhancers) for transcriptional repression and reduced expression of the target gene. For instance, provided herein are epigenetic-modifying DNA binding systems combining a DNA-targeting domain (e.g. a dCas and gRNA combination) and an effector domain, in which the effector domain is able to target a target site of the gene or a regulatory element thereof to precisely repress or reduce transcription of the gene by epigenetic regulation. Transcriptional repression, leading to reduced gene expression, reprograms the cell to a Tscm phenotype. Moreover, the epigenetic modification of the cell does not interfere with the DNA thereby avoiding safety concerns with gene editing approaches. The ability to epigenetically control the differentiation fate of T cells provides an advantageous approach for increasing the percentage or number of T cells in a population of T cells that have a Tscm phenotype, but without having to specifically select (i.e. isolate) for the population of Tscm cells, genetically engineer or edit the cell, or otherwise alter ex vivo T cell manufacturing to limit their differentiation to more mature T cell subsets. As a result, what was once a rare population of T cells can be efficiently increased to provide for a highly enriched population of Tscm T cells to sufficient numbers for cell therapy methods, including ACT.

[0132] Thus, provided herein is an epigenetic-modifying DNA-targeting system that binds to a target site in a gene or regulatory DNA element thereof in a T cell, such as any described herein, in which the DNA-targeting system includes a DNA binding domain and at least one effector domain capable of repressing or reducing transcription of the gene. In some embodiments, the DNA binding domain is a nuclease-inactive Clustered Regularly Interspaced Short Palindromic Repeats associated (Cas) protein or variant thereof, such as a dead Cas (dCas, e.g. dCas9), and the DNA-targeting system further includes at least one gRNA that can complex with the Cas and has a gRNA spacer sequence that is capable of hybridizing to the target site of the gene. In provided embodiments, the provided epigenetic-modifying DNA-targeting system reduces transcription of the gene and thereby promotes a Tcsm cell phenotype. Also provided herein are related gRNA, including Cas/gRNA combinations, polynucleotides, compositions and methods involving or related to the epigenetic-modifying DNA targeting system. The provided embodiments can be used to target genes that when transcriptionally repressed can vastly facilitate the enrichment of a Tscm CCR7+/CD27+ TSCM cell-like phenotypes. This approach offers substantial clinical solutions to circumvent the problems with T cell persistence, suboptimal functionality, and exhaustion.

[0133] All publications, including patent documents, scientific articles and databases, referred to in this application are incorporated by reference in their entirety for all purposes to the same extent as if each individual publication were individually incorporated by reference. If a definition set forth herein is contrary to or otherwise inconsistent with a definition set forth in the patents, applications, published applications and other publications that are herein incorporated by reference, the definition set forth herein prevails over the definition that is incorporated herein by reference.

[0134] The section headings used herein are for organizational purposes only and are not to be construed as limiting the subject matter described.

### I. DNA-TARGETING SYSTEMS

[0135] In some embodiments, provided are DNA-targeting systems capable of specifically targeting a target site in a gene (also called a target gene herein) or DNA regulatory element thereof, and reducing transcription of the gene. In provided embodiments, the DNA-targeting systems include a DNA-targeting domain that bind to a target site in a gene or regulatory DNA element thereof. In provided embodiments, the DNA-targeting systems additionally include at least one effector domain that is able to epigenetically modify one or more DNA bases of the gene or regulatory element thereof, in which the epigenetic modification results in a reduction in transcription of the gene (e.g. inhibits transcription or reduces transcription of the gene compared to the absence of the DNA-targeting system). Hence, the terms DNA-targeting system and epigenetic-modifying DNA targeting system may be used herein interchangeably. In some embodiments, the DNA-targeting systems includes a fusion protein comprising (a) a DNA-targeting domain capable of being targeted to the target site; and (b) at least one effector domain capable of reducing transcription of the gene. For instance, the at least one effector domain is a transcription repressor domain.

[0136] In aspects of the provided embodiments, a DNA-targeting system provided herein targets a gene or a regulatory element thereof to reduce transcription of the gene in an immune cell, in which the reduced transcription modulates one or more activities or functions of the immune cells, such as a phenotype of the immune cell. In some embodiments, reduced transcription of the gene results in a reduction in expression of the gene, i.e. reduced gene expression, in the immune cell. In some embodiments, decreased transcription of the gene, such as decreased gene expression, promotes a stem cell-like memory T (T_{SCM}) cell phenotype, or a T_{SCM} cell-like phenotype.

[0137] In some aspects, the cell is an immune cell, such as a lymphocyte (e.g. a T cell, B cell, or Natural Killer (NK) cell). In some aspects, the cell is a T cell. For instance, provided herein is a DNA-targeting system provided herein targets a gene or a regulatory element thereof to reduce transcription of the gene in a T cell, in which the reduced transcription modulates one or more activities or functions of the T cell, such as a phenotype of the T cell. In some embodiments, reduced transcription of the gene results in a reduction in expression of the gene, i.e. reduced gene expression, in the T cell. In some aspects the cell is a primary T cell. In some aspects, the cell is a cell that can be differentiated into a T cell, such as a T cell progenitor, pluripotent stem cell, or induced pluripotent stem cell. In some aspects, the cell is an engineered T cell, such as a T cell comprising a recombinant T cell receptor or chimeric antigen receptor (CAR).

[0138] In some aspects, the cell is from a human subject. In some aspects the cell is a cell in a subject (i.e. a cell in vivo) or from a subject (i.e. a cell ex vivo).

[0139] In some embodiments, the DNA-targeting domain (also referred to interchangeably herein as a DNA-targeting domain) comprises or is derived from a CRISPR associated (Cas) protein, zinc finger protein (ZFP), meganuclease, homing endonuclease, I-SceI enzyme, or variants thereof. In some embodiments, the DNA-targeting domain comprises a catalytically inactive (e.g. nuclease-inactive or nuclease-inactivated) variant of any of the foregoing. In some embodiments, the DNA-targeting domain comprises a deactivated Cas9 (dCas9) protein or variant thereof.

[0140] In some embodiments, the DNA-targeting domain comprises or is derived from a Cas protein or variant thereof and the DNA-targeting system comprises one or more guide RNAs (gRNAs). In some embodiments, the gRNA comprises a spacer sequence that is capable of targeting and/or hybridizing to the target site. In some embodiments, the gRNA is capable of complexing with the Cas protein or variant thereof. In some aspects, the gRNA directs or recruits the Cas protein or variant thereof to the target site.

[0141] In some embodiments, the effector domain is capable of modulating transcription of the gene. In some embodiments, the effector domain directly or indirectly leads to reduced transcription of the gene. In some embodiments, the effector domain induces, catalyzes or leads to transcription repression. In some embodiments, the effector domain induces transcription repression. In some aspects, the effector domain is selected from KRAB, ERF, Mxi1, SID4X, Mad-SID, or a DNMT family protein domain (e.g. DNMT3A or DNMT3B), a fusion of one or more DNMT family proteins or domains thereof (e.g. DNMT3A/L, which comprises a fusion of DNMT3A and DNMT3L domains) protein. In some embodiments, the effector domain is KRAB. In some embodiments, the effector domain is DNMT3A/L.

[0142] In some embodiments, the fusion protein of the DNA-targeting system comprises dCas9-KRAB. In some embodiments, the fusion protein of the DNA-targeting system comprises a DNMT3A/L-dCas9-KRAB-fusion protein. In some embodiments, the fusion protein of the DNA-targeting system comprises a KRAB-dCas9-DNMT3A/L-fusion protein.

[0143] Exemplary components and features of the DNA-targeting systems are provided below in the following subsections.

### A. Target Genes and Target Sites

[0144] In some embodiments, the target gene is a gene in which reduced expression of the gene regulates a cellular phenotype. In some embodiments, the target gene is capable of regulating a phenotype in a T cell. In some embodiments, the target gene is capable of regulating T cell differentiation. In some embodiments, decreased transcription of the gene, such as decreased gene expression, promotes a stem cell-like memory T (T_{SCM}) cell phenotype, or a T_{SCM} cell-like phenotype.

[0145] In some aspects, the T_{SCM} cell phenotype is one that is characterized by a cell surface phenotype. In some embodiments, the T_{SCM} cell phenotype comprises expression of one or more cell-surface markers selected from CCR7+, CD27+, CD45RA+, CD45RO−, CCR7+, CD62L+, CD28+, CD27+, IL-7Rα+, CXCR3+, CD95+, CD11a+, IL-2Rβ+, CD58+, and CD57−, or any combination thereof. In some aspects, the T_{SCM} cell phenotype comprises expression of CCR7+ and/or CD27+. In some aspects, the T_{SCM} cell phenotype comprises expression of CCR7+ and CD27+.

[0146] It is understood that embodiments of provided epigenetic-modifying DNA-targeting systems are not limited to modulating expression of target genes in T cells, but may also be used to modulate any one or more of the target gene as described herein in any lymphoid cell. In addition to T cells, lymphoid cells can include NK cells, NKT cells, any cells that have been differentiated from stem cells into such lymphoid cells and/or have been differentiated from progenitor cells, such as common lymphoid progenitors (CLPs). In some embodiments, the lymphoid cells are differentiated from stem cells, such as hematopoietic stem or progenitor cells, or progenitor cells. In some embodiments, the lymphoid cells are trans-differentiated from a non-pluripotent cell of non-hematopoietic lineage.

[0147] In some embodiments, the lymphoid cell for modulation is an isolated or enriched population of lymphoid immune cells, such as a population isolated or enriched in T, NK and/or NKT cells. In some embodiments, the cells for modulation are isolated or enriched T cells. In some embodiments, the cells for modulation are isolated or enriched NK cells. In some embodiments, the cells for modulation are isolated or enriched NK T cells. In some embodiments, isolated or enriched populations or subpopulations of immune cells comprising T, NK, and/or NKT cells for modulation can be obtained from a unit of blood using any number of techniques known to the skilled artisan, such as Ficoll™ separation. In one embodiment, T, NK or NKT cells from the circulating blood of an individual are obtained by apheresis and separated from other nucleated white blood cells, red blood cells and platelets, such as by Ficoll™ separation or affinity-based selection. In some embodiments, the cells are primary cells. In some embodiments, the primary cells are isolated or enriched from a peripheral blood sample from a subject, such as a human subject.

[0148] In some embodiments, the lymphoid cells for modulation is differentiated in vitro from a stem cell or progenitor cell. In some embodiments, the lymphoid cells, such as T, NK or NKT cells or lineages thereof, can be differentiated from a stem cell, a hematopoietic stem or progenitor cell (HSC), or a progenitor cell. The progenitor cell can be a CD34+ hemogenic endothelium cell, a multipotent progenitor cell, a T cell progenitor, an NK cell progenitor, or an NKT cell progenitor. In some embodiments, the progenitor cells is a lymphoid progenitor cells such as a common lymphoid progenitor cell, early thymic progeniotor cells, pre-T cell progenitor cells, pre-NK progenitor cell, T progenitor cell, NK progenitor cell or NKT progenitor cell. The stem cell can be a pluripotent stem cell, such as induced pluripotent stem cells (iPSCs) and embryonic stem cells (ESCs). The iPSC is a non-naturally occurring reprogrammed pluripotent cell. Once the cells of a subject have been reprogrammed to a pluripotent state, the cells can then be programmed or differentiated to a desired cell type or subtypes, such as T, NK, or NKT cells.

[0149] In some embodiments, the iPSC is differentiated to a T, NK or NKT cells by a multi-stage differentiation platform wherein cells from various stages of development can be induced to assume a hematopoietic phenotype, ranging from mesodermal stem cells, to fully differentiated T, NK or NKT cells (See e.g. U.S. Applications 62/107,517 and 62/251,016, the disclosures of which are incorporated herein in their entireties).

[0150] In some embodiments, the population or subpopulation of lymphoid cells is trans-differentiated in vitro from a non-pluripotent cell of non-hematopoietic fate to a hematopoietic lineage cell or from a non-pluripotent cell of a first hematopoietic cell type to a different hematopoietic cell type, which can be a T, NK, or NKT progenitor cell or a fully differentiated specific type of immune cell, such as T, NK, or NKT cell (See e.g. U.S. Pat. No. 9,376,664 and U.S. application Ser. No. 15/072,769, the disclosure of which is incorporated herein in their entirety). In some embodiments, the non-pluripotent cell of non-hematopoietic fate is a somatic cell, such as a skin fibroblast, an adipose tissue-derived cell and a human umbilical vein endothelial cell (HUVEC). Somatic cells useful for trans-differentiation may be immortalized somatic cells.

[0151] Various strategies are being pursued to induce pluripotency, or increase potency, in cells (Takahashi, K., and Yamanaka, S., Cell 126, 663-676 (2006); Takahashi et al., Cell 131, 861-872 (2007); Yu et al., Science 318, 1917-1920 (2007); Zhou et al., Cell Stem Cell 4, 381-384 (2009); Kim et al., Cell Stem Cell 4, 472-476 (2009); Yamanaka et al., 2009; Saha, K., Jaenisch, R., Cell Stem Cell 5, 584-595 (2009)), and improve the efficiency of reprogramming (Shi et al., Cell Stem Cell 2, 525-528 (2008a); Shi et al., Cell Stem Cell 3, 568-574 (2008b); Huangfu et al., Nat Biotechnol 26, 795-797 (2008a); Huangfu et al., Nat Biotechnol 26, 1269-1275 (2008b); Silva et al., Plos Bio 6, e253. Doi: 10.1371/journal. Pbio. 0060253 (2008); Lyssiotis et al., PNAS 106, 8912-8917 (2009); Ichida et al., Cell Stem Cell 5, 491-503 (2009); Maherali, N., Hochedlinger, K., Curr Biol 19, 1718-1723 (2009b); Esteban et al., Cell Stem Cell 6, 71-79 (2010); and Feng et al., Cell Stem Cell 4, 301-312 (2009)), the disclosures of which are hereby incorporated by reference in their entireties.

[0152] It is understood that a cell that is positive (+) for a particular cell surface marker is a cell that expresses the marker on its surface at a level that is detectable. Likewise, it is understood that a cell that is negative (−) for a particular cell surface marker is a cell that expresses the marker on its surface at a level that is not detectable. Antibodies and other binding entities can be used to detect expression levels of marker proteins to identify or detect a given cell surface marker. Suitable antibodies may include polyclonal, monoclonal, fragments (such as Fab fragments), single chain antibodies and other forms of specific binding molecules. Antibody reagents for cell surface markers above are readily known to a skilled artisan. A number of well-known methods for assessing expression level of surface markers or proteins may be used, such as detection by affinity-based methods, e.g., immunoaffinity-based methods, e.g., in the context of surface markers, such as by flow cytometry. In some embodiments, the label is a fluorophore and the method for detection or identification of cell surface markers on cells (e.g. T cells) is by flow cytometry. In some embodiments, different labels are used for each of the different markers by multicolor flow cytometry. In some embodiments, surface expression can be determined by flow cytometry, for example, by staining with an antibody that specifically binds to the marker and detecting the binding of the antibody to the marker.

[0153] In some embodiments, a cell (e.g. T cell) is positive (pos or +) for a particular marker if there is detectable presence on or in the cell of a particular marker, which can be an intracellular marker or a surface marker. In some embodiments, surface expression is positive if staining by flow cytometry is detectable at a level substantially above the staining detected by carrying out the same procedures with an isotype-matched control under otherwise identical conditions and/or at a level substantially similar to, or in some cases higher than, a cell known to be positive for the marker and/or at a level higher than that for a cell known to be negative for the marker.

[0154] In some embodiments, a cell (e.g. T cell) is negative (neg or −) for a particular marker if there is an absence of detectable presence on or in the cell of a particular marker, which can be an intracellular marker or a surface marker. In some embodiments, surface expression is negative if staining is not detectable by flow cytometry at a level substantially above the staining detected by carrying out the same procedures with an isotype-matched control under otherwise identical conditions and/or at a level substantially lower than a cell known to be positive for the marker and/or at a level substantially similar to a cell known to be negative for the marker.

[0155] In some aspects, the T_{SCM} cell phenotype can be characterized by one or more functions of the cells. In some aspects, the Tscm cell phenotype is characterized by polyfunctional activity of the T cells to produce more than one T cell stimulatory cytokine, such as determined in a polyfunctional cytokine secretion assay following stimulation of the T cells with a stimulatory agent. In some embodiments, the T cell is polyfunctional for producing two or more cytokines. In some embodiments, a T cell is polyfunctional for producing two or more cytokines selected fro m among interferon-gamma (IFN-gamma), interleukin 2 (IL-2) and TNF-alpha. In some embodiments, a polyfunctional T cell produces IFN-gamma, IL-2, and TNF-alpha. In some embodiments, the stimulatory agent is a non-specific or non-antigen-dependent T cell stimulatory agent. In some embodiments, the non-specific or non-antigen dependent T cell stimulatory agent is a polyclonal stimulatory agent. In some embodiments, the non-specific or non-antigen dependent stimulatory agent comprises PMA/ionomycin, anti-CD3/anti-CD28, phytohemagglutinin (PHA) or concanavalin A (ConA). In some embodiments, the non-specific or non-antigen dependent T cell stimulatory agent contains PMA/ionomycin.

[0156] In particular embodiments, the production of one or more cytokines is measured, detected, and/or quantified by intracellular cytokine staining. Intracellular cytokine staining (ICS) by flow cytometry is a technique well-suited for studying cytokine production at the single-cell level. It detects the production and accumulation of cytokines within the endoplasmic reticulum after cell stimulation, allowing for the identification of cell populations that are positive or negative for production of a particular cytokine or for the separation of high producing and low producing cells based on a threshold. In some embodiments, as described above, the stimulation can be performed using nonspecific stimulation, e.g., is not an antigen-specific stimulation. For example, PMA/ionomycin can be used for nonspecific cell stimulation. ICS can also be used in combination with other flow cytometry protocols for immunephenotyping using cell surface markers or with MHC multimers to access cytokine production in a particular subgroup of cells, making it an extremely flexible and versatile method. Other single-cell techniques for measuring or detecting cytokine production include, but are not limited to ELISPOT, limiting dilution, and T cell cloning. In some embodiments, the assays to assay polyfunctional cytokine secretion of multiple cytokines, can include multiplexed assays or other assays to assess polyfunctionality (see, e.g., Xue et al., (2017) Journal for ImmunoTherapy of Cancer 5:85).

[0157] The target genes for modulation by the provided epigenetic-modifying DNA-targeting systems herein include any whose transcription and expression are decreased in cells with a particular or desired function or activity, such as cell phenotype (e.g. a T_{SCM} cell-like phenotype). Various methods may be utilized to characterize the transcription or expression levels of a gene in a cell (e.g. T cell) such as after the cell has been contacted or introduced with a provided epigenetic-modifying DNA-targeting system and selected for a desired activity or function, such as cell phenotype (e.g. a T_{SCM} cell-like phenotype). In some embodiments, the T_{SCM} cell-like phenotype can be a phenotype comprising one or more cell surface markers as described above. In some embodiments, the phenotype is CCR7+ and/or CD27+, such as a double positive CCR7+ and CD27+ phenotype. In some embodiments, analyzing the transcription activity or expression of a gene may be by RNA analysis. In some embodiments, the RNA analysis includes RNA quantification. In some embodiments, the RNA quantification occurs by reverse transcription quantitative PCR (RT-qPCR), multiplexed qRT-PCR, fluorescence in situ hybridization (FISH), or combinations thereof.

[0158] In some embodiments, the gene is one in which expression of the gene in the cell (e.g. T cell), is decreased after having been contacted or introduced with a provided epigenetic-modifying DNA-targeting system. In some embodiments, the reduction in gene expression in a cell (e.g. T cell) is about a log 2 fold change of less than −1.0. For instance, the log 2 fold change is lesser than at or about −1.5, at or about −2.0, at or about −2.5, at or about −3.0, at or about −4.0, at or about −5.0, at or about −6.0, at or about −7.0, at or about −8.0, at or about −9.0, at or about-10.0 or any value between any of the foregoing compared to the level of the gene in a control cell.

[0159] In some embodiments, the gene is selected from the list consisting of: BMP4, E2F7, ESRRG, LYL1, STAT5A, THAP10, ZNF362, ZSCAN1, ANHX, CPEB1, CSRNP1, EN2, EPAS1, IRX3, LHX8, NR5A2, PRDM16, RAX2, SCML4, SMAD1, SOX6, SUV39H1, TFDP1, ZNF287, ZNF438, ZNF681, ZNF853, BMP4, CARF, ESRRG, ESRRG, FOXR2, HOXA7, IRF9, KAT5, KLF5, NEUROD1, PAX6, PIN1, PURG, PURG, RARA, SNAPC5, STAT5A, TBX22, WT1, ZNF138, ZNF143, ZNF205, ZNF235, ZNF526, ZNF548, ZNF559, ZNF611, ZNF655, ZNF672, ZNF699, ZNF706, ZNF714, ZNF772, ZNF782, ZSCAN1, ZSCAN26, ADNP, AHRR, AKNA, ALX3, ALX4, ANHX, AR, ARHGAP35, ARID3C, ARID5B, ASCL5, ATF6B, ATOH7, BARHL1, BARHL2, BATF, BBX, BHLHE40, BNC2, BRD4, BRD9, BSX, CCDC17, CDX1, CDX2, CDX4, CEBPB, CENPB, CLOCK, CREB3, CREB3L4, CSRNP3, CTCF, CUX1, CUX2, DACH2, DLX1, DLX4, DLX5, DLX6, DMRTB1, DNMT3B, DOTIL, DPF1, DR1, E2F2, E2F3, EBF3, EGR2, EHF, ELF5, ELF5, ELMSAN1, EMX1, ETS2, ETV4, ETV4, ETV6, EZH1, FERD3L, FERD3L, FIZ1, FOS, FOSB, FOXA1, FOXA2, FOXA3, FOXC2, FOXD3, FOXE1, FOXJ3, FOXN2, FOXN4, FOXO1, FOXP3, FOXS1, GATA2, GATA3, GATAD2A, GCM2, GFI1, GLI2, GLYR1, GPBP1L1, GRHL1, GTF2B, GTF2I, HDAC2, HES2, HES7, HESX1, HEY1, HIF3A, HIVEP3, HLF, HLX, HMG20A, HMGA2, HMGA2, HMGA2, HMGN3, HMX2, HNF1A, HNF4G, HNF4G, HOXA1, HOXA11, HOXB1, HOXB2, HOXB3, HOXC12, HOXC9, HOXC9, HOXD9, HSF4, HSF5, IKZF1, IKZF2, IKZF3, IKZF4, IRF7, IRX3, ISL2, JRK, JRK, JRKL, KAT7, KDM1A, KDM2B, KDM5D, KLF14, KLF9, KMT2B, KMT2B, L3MBTL4, LEF1, LHX6, LHX9, LIN28A, LIN28A, LMX1A, MAF, MAFF, MBD3, MBD4, MBNL2, MED1, MED14, MED23, MED24, MEF2C, MEF2D, MEIS3, MESP1, MESP1, MGA, MITF, MLX, MNX1, MYF5, MYOG, MYPOP, MYRFL, MYT1L, NCOR1, NEUROG1, NFAT5, NFATC2, NFATC2, NFATC3, NFE2L1, NFE2L3, NFIA, NFYB, NKX1-2, NKX2-3, NKX2-4, NKX2-5, NOTCH3, NOTO, NOTO, NR1H2, NR1H4, NR112, NR2C2, NR2F1, NR5A2, OSR2, OTX1, OVOL1, PA2G4, PATZ1, PAX9, PAX9, PBX4, PGR, PITX1, PITX3, PITX3, PITX3, POU2F2, POU3F1, POU3F2, POU3F3, POU5F1, PRDM1, PRDM16, PRDM7, PRR12, PRRX1, RBCK1, RHOXF1, RUNX2, SALL3, SIM1, SIX1, SIX6, SKI, SKIL, SKOR1, SMAD2, SMAD5, SMYD3, SNAPC2, SOX1, SOX14, SOX30, SOX5, SOX6, SP2, SP3, SP5, SP8, SP9, SPIB, STAT5B, T, TBPL1, TBX5, TBX6, TCF12, TCF23, TCF3, TFAP2A, TFAP2A, TFAP2E, TFDP2, TFDP3, TGIF2, TGIF2LX, THAP6, THRA, TIGD1, TIGD3, TIGD5, TLX3, TOX, TOX2, TRIM27, TRIM27, TRIM40, TRIM52, TSHZ2, VAX1, VEGFA, VSX1, VSX1, WNT1, WNT3A, YBX1, YY1, YY2, YY2, ZBED5, ZBED5, ZBTB2, ZBTB21, ZBTB38, ZBTB4, ZBTB40, ZBTB42, ZBTB49, ZBTB7B, ZBTB7B, ZBTB7C, ZBTB8B, ZBTB9, ZC3H8, ZEB2, ZFHX2, ZFHX3, ZFP28, ZFP41, ZFP69B, ZFP90, ZGLP1, ZHX3, ZIC5, ZKSCAN1, ZKSCAN1, ZKSCAN2, ZKSCAN7, ZNF107, ZNF121, ZNF132, ZNF135, ZNF135, ZNF140, ZNF141, ZNF222, ZNF225, ZNF229, ZNF230, ZNF248, ZNF25, ZNF26, ZNF267, ZNF280C, ZNF281, ZNF283, ZNF286B, ZNF304, ZNF317, ZNF317, ZNF318, ZNF320, ZNF33B, ZNF346, ZNF358, ZNF367, ZNF382, ZNF383, ZNF385B, ZNF385B, ZNF391, ZNF415, ZNF423, ZNF43, ZNF43, ZNF432, ZNF433, ZNF436, ZNF441, ZNF441, ZNF443, ZNF461, ZNF462, ZNF468, ZNF473, ZNF483, ZNF486, ZNF491, ZNF507, ZNF514, ZNF519, ZNF519, ZNF540, ZNF543, ZNF546, ZNF549, ZNF555, ZNF562, ZNF567, ZNF569, ZNF574, ZNF577, ZNF596, ZNF610, ZNF616, ZNF621, ZNF626, ZNF627, ZNF629, ZNF630, ZNF630, ZNF641, ZNF645, ZNF658, ZNF660, ZNF662, ZNF677, ZNF682, ZNF697, ZNF703, ZNF705A, ZNF705B, ZNF705G, ZNF716, ZNF729, ZNF750, ZNF75A, ZNF765, ZNF771, ZNF773, ZNF773, ZNF773, ZNF774, ZNF778, ZNF778, ZNF784, ZNF789, ZNF804B, ZNF816, ZNF823, ZNF83, ZNF83, ZNF831, ZNF846, ZNF852, ZNF879, ZNF91, ZNF93, ZNF99, ZNF99, ZSCAN16, ZSCAN2, ZSCAN21, ZSCAN5A, ZSCAN5A, ZSCAN5B, ZSCAN5B.

[0160] In some embodiments, the epigenetic-modifying DNA-targeting system targets to or binds to a target site in the gene, such as any described above. In some embodiments, the target site is located in a regulatory DNA element of the gene in the cell (e.g. T cell). In some embodiments, a regulatory DNA element is a sequence to which a gene regulatory protein may bind and affect transcription of the gene. In some embodiments, the regulatory DNA element is a cis, trans, distal, proximal, upstream, or downstream regulatory DNA element of a gene. In some embodiments, the regulatory DNA element is a promoter or enhancer of the gene. In some embodiments, the target site is located within a promoter, enhancer, exon, intron, untranslated region (UTR), 5′ UTR, or 3′ UTR of the gene. In some embodiments, a promoter is a nucleotide sequence to which RNA polymerase binds to begin transcription of the gene. In some embodiments, a promoter is a nucleotide sequence located within about 100 bp, about 500 bp, about 1000 bp, or more, of a transcriptional start site of the gene. In some embodiments the target site is located within a sequence of unknown or known function that is suspected of being able to control expression of a gene.

[0161] In some embodiments, the target site comprises a sequence selected from any one of SEQ ID NOS: 1-484, a contiguous portion thereof of at least 14 nucleotides of any one of SEQ ID NOS: 1-484, or a complementary sequence of any of the foregoing. In some embodiments, the target site is a contiguous portion of any one of SEQ ID NOS: 1-484 that is 15, 16, 17, 18 or 19 nucleotides, or a complementary sequence of any of the foregoing. In some embodiments, the target site is a sequence having at or at least 80%, 85%, 90%, 91%, 92%, 93%, 94%, 95%, 96%, 97%, 98%, 99%, 99.5%, 99.9%, or 100% sequence identity to all or a contiguous portion of a target site sequence described herein above. In some embodiments, the target site is the sequence set forth in any one of SEQ ID NOS: 1-484

[0162] In some embodiments, the gene is selected from the list consisting of: BMP4, E2F7, ESRRG, LYL1, STAT5A, THAP10, ZNF362, ZSCAN1, ANHX, CPEB1, CSRNP1, EN2, EPAS1, IRX3, LHX8, NR5A2, PRDM16, RAX2, SCML4, SMAD1, SOX6, SUV39H1, TFDP1, ZNF287, ZNF438, ZNF681, ZNF853.

[0163] In some embodiments, the target site comprises a sequence selected from any one of SEQ ID NOS: 1-27, a contiguous portion thereof of at least 14 nucleotides of any one of SEQ ID NOs: 1-27, or a complementary sequence of any of the foregoing. In some embodiments, the target site is a contiguous portion of any one of SEQ ID NOS: 1-27 that is 15, 16, 17, 18 or 19 nucleotides, or a complementary sequence of any of the foregoing. In some embodiments, the target site is a sequence having at or at least 80%, 85%, 90%, 91%, 92%, 93%, 94%, 95%, 96%, 97%, 98%, 99%, 99.5%, 99.9%, or 100% sequence identity to all or a portion of a target site sequence described herein above. In some embodiments, the target site is the sequence set forth in any one of SEQ ID NOS: 1-27.

[0164] In some embodiments, the gene is selected from the list consisting of: BMP4, E2F7, ESRRG, LYL1, STAT5A, THAP10, ZNF362, ZSCAN1.

[0165] In some embodiments, the target site comprises a sequence selected from any one of SEQ ID NOS: 1-8, a contiguous portion thereof of at least 14 nucleotides of any one of SEQ ID NOS: 1-8, or a complementary sequence of any of the foregoing. In some embodiments, the target site is a contiguous portion of any one of SEQ ID NOS: 1-8 that is 15, 16, 17, 18 or 19 nucleotides, or a complementary sequence of any of the foregoing. In some embodiments, the target site is a sequence having at or at least 80%, 85%, 90%, 91%, 92%, 93%, 94%, 95%, 96%, 97%, 98%, 99%, 99.5%, 99.9%, or 100% sequence identity to all or a portion of a target site sequence described herein above. In some embodiments, the target site is the sequence set forth in any one of SEQ ID NOS: 1-8.

### B. CRISPR-Based DNA-Targeting Systems

[0166] Provided herein are DNA-targeting systems based on CRISPR/Cas systems, i.e. CRISPR/Cas-based DNA-targeting systems, that are able to bind to a target site in a target gene without mediating nucleic acid cleavage at the target site. The CRISPR/Cas-based DNA-targeting systems may be used to modulate expression of a target gene in a cell, such as a T cell. In some embodiments, the target gene may include any as described herein, including any described above in Section I.A. In some embodiments, the target site of the target gene may include any as described herein, including any described above in Section I.A. The CRISPR/Cas-based DNA-targeting system includes a fusion protein of a nuclease-inactive Cas protein or a variant thereof and an effector domain that reduces transcription of a gene (i.e. a transcriptional repressor), and at least one gRNA.

[0167] The CRISPR system (also known as CRISPR/Cas system, or CRISPR-Cas system) refers to a conserved microbial nuclease system, found in the genomes of bacteria and archaea, that provides a form of acquired immunity against invading phages and plasmids. Clustered Regularly Interspaced Short Palindromic Repeats (CRISPR), refers to loci containing multiple repeating DNA elements that are separated by non-repeating DNA sequences called spacers. Spacers are short sequences of foreign DNA that are incorporated into the genome between CRISPR repeats, serving as a ‘memory’ of past exposures. Spacers encode the DNA-targeting portion of RNA molecules that confer specificity for nucleic acid cleavage by the CRISPR system. CRISPR loci contain or are adjacent to one or more CRISPR-associated (Cas) genes, which can act as RNA-guided nucleases for mediating the cleavage, as well as non-protein coding DNA elements that encode RNA molecules capable of programming the specificity of the CRISPR-mediated nucleic acid cleavage.

[0168] In Type II CRISPR/Cas systems with the Cas protein Cas9, two RNA molecules and the Cas9 protein form a ribonucleoprotein (RNP) complex to direct Cas9 nuclease activity. The CRISPR RNA (crRNA) contains a spacer sequence that is complementary to a target nucleic acid sequence (target site), and that encodes the sequence specificity of the complex. The trans-activating crRNA (tracrRNA) base-pairs to a portion of the crRNA and forms a structure that complexes with the Cas9 protein, forming a Cas/RNA RNP complex.

[0169] Naturally occurring CRISPR/Cas systems, such as those with Cas9, have been engineered to allow efficient programming of Cas/RNA RNPs to target desired sequences in cells of interest, both for gene-editing and modulation of gene expression. The tracrRNA and crRNA have been engineered to form a single chimeric guide RNA molecule, commonly referred to as a guide RNA (gRNA), for example as described in WO 2013/176772 A1, WO 2014/093661 A2, WO 2014/093655 A2, Jinek, M. et al. Science 337 (6096): 816-21 (2012), or Cong, L. et al. Science 339 (6121): 819-23 (2013). The spacer sequence of the gRNA can be chosen by a user to target the Cas/gRNA RNP complex to a desired locus, e.g. a desired target site in the target gene.

[0170] Cas proteins have also been engineered to allow targeting of Cas/gRNA RNPs without inducing cleavage at the target site. Mutations in Cas proteins can reduce or abolish nuclease activity of the Cas protein, rendering the Cas protein catalytically inactive. Cas proteins with reduced or abolished nuclease activity are referred to as deactivated Cas (dCas), or nuclease-inactive Cas (iCas) proteins, as referred to interchangeably herein. Exemplary deactivated Cas9 (dCas9) derived from S. pyogenes contains silencing mutations of the RuvC and HNH nuclease domains (D10A and H840A), for example as described in WO 2013/176772 A1, WO 2014/093661 A2, Jinek, M. et al. Science 337 (6096): 816-21 (2012), and Qi, L. et al. Cell 152 (5): 1173-83 (2013). Exemplary dCas variants derived from the Cas12 system (i.e. Cpf1) are described, for example in WO 2017/189308 A1 and Zetsche, B. et al. Cell 163 (3): 759-71 (2015). Conserved domains that mediate nucleic acid cleavage, such as RuvC and HNH endonuclease domains, are readily identifiable in Cas orthologues, and can be mutated to produce inactive variants, for example as described in Zetsche, B. et al. Cell 163 (3): 759-71 (2015).

[0171] dCas-fusion proteins with transcriptional regulators have been used as a versatile platform for ectopically regulating gene expression in target cells. For example, fusing dCas9 with transcriptional repressors such as KRAB (Krüppel associated box) can result in robust repression of gene expression. A variety of dCas-fusion proteins with KRAB and other transcriptional regulators can be engineered for regulation of gene expression, for example as described in WO 2014/197748 A2, WO 2016/130600 A2, WO 2017/180915 A2, WO 2021/226555 A2, WO 2013/176772 A1, WO 2014/152432 A2, WO 2014/093661 A2, Adli, M. Nat. Commun. 9, 1911 (2018), Perez-Pinera, P. et al. Nat. Methods 10, 973-976 (2013), Mali, P. et al. Nat. Biotechnol. 31, 833-838 (2013), and Maeder, M. L. et al. Nat. Methods 10, 977-979 (2013). In some aspects, provided is a DNA-targeting system comprising a fusion protein comprising a DNA-targeting domain comprising a nuclease-inactive Cas protein or variant thereof, and an effector domain for reducing or inducing transcriptional repression (i.e. a transcriptional repressor) when targeted to the target gene in the cell (e.g. T cell). In such embodiments, the DNA-targeting system also includes one or more gRNA, provided in combination or as a complex with the dCas protein or variant thereof, for targeting of the DNA-targeting system to the target site of the target gene. In some embodiments, the fusion protein is guided to a specific target site sequence of the target gene by the guide RNA, wherein the effector domain mediates targeted epigenetic modification to reduce or repress transcription of the target gene.

i. CRISPR-Based DNA-Targeting Domains

[0172] In some aspects, the DNA-targeting domain comprises a CRISPR-associated (Cas) protein or variant thereof, or is derived from a Cas protein or variant thereof, and is nuclease-inactive (i.e. is a dCas protein).

[0173] In some embodiments, the Cas protein is derived from a Class 1 CRISPR system (i.e. multiple Cas protein system), such as a Type I, Type III, or Type IV CRISPR system. In some embodiments, the Cas protein is derived from a Class 2 CRISPR system (i.e. single Cas protein system), such as a Type II, Type V, or Type VI CRISPR system. In some embodiments, the Cas protein is from a Type V CRISPR system. In some embodiments, the Cas protein is derived from a Cas12 protein (i.e. Cpf1) or variant thereof, for example as described in WO 2017/189308 A1 and Zetsche, B. et al. Cell. 163 (3): 759-71 (2015). In some embodiments, the Cas protein is derived from a Type II CRISPR system. In some embodiments, the Cas protein is derived from a Cas9 protein or variant thereof, for example as described in WO 2013/176772 A1, WO 2014/152432 A2, WO 2014/093661 A2, WO 2014/093655 A2, Jinek, M. et al. Science 337 (6096): 816-21 (2012), Mali, P. et al. Science 339 (6121): 823-6 (2013), Cong, L. et al. Science 339 (6121): 819-23 (2013), Perez-Pinera, P. et al. Nat. Methods 10, 973-976 (2013), or Mali, P. et al. Nat. Biotechnol. 31, 833-838 (2013). Various CRISPR/Cas systems and associated Cas proteins for use in gene editing and regulation have been described, for example in Moon, S. B. et al. Exp. Mol. Med. 51, 1-11 (2019), Zhang, F. Q. Rev. Biophys. 52, E6 (2019), and Makarova K. S. et al. Methods Mol. Biol. 1311:47-75 (2015).

[0174] In some embodiments, the dCas9 protein can comprise a sequence derived from a naturally occurring Cas9 molecule, or variant thereof. In some embodiments, the dCas9 protein can comprise a sequence derived from a naturally occurring Cas9 molecule of S. pyogenes, S. thermophilus, S. aureus, C. jejuni, N. meningitidis, F. novicida, S. canis, S. auricularis, or variant thereof. In some embodiments, the dCas9 protein comprises a sequence derived from a naturally occurring Cas9 molecule of S. aureus. In some embodiments, the dCas9 protein comprises a sequence derived from a naturally occurring Cas9 molecule of S. pyogenes.

[0175] Non-limiting examples of Cas9 orthologs from other bacterial strains include but are not limited to: Cas proteins identified in Acaryochloris marina MBIC11017; Acetohalobium arabaticum DSM 5501; Acidithiobacillus caldus; Acidithiobacillus ferrooxidans ATCC 23270; Alicyclobacillus acidocaldarius LAA1; Alicyclobacillus acidocaldarius subsp. acidocaldarius DSM 446; Allochromatium vinosum DSM 180; Ammonifex degensii KC4; Anabaena variabilis ATCC 29413; Arthrospira maxima CS-328; Arthrospira platensis str. Paraca; Arthrospira sp. PCC 8005; Bacillus pseudomycoides DSM 12442; Bacillus selenitireducens MLS10; Burkholderiales bacterium 1_1_47; Caldicelulosiruptor becscii DSM 6725; Candidatus Desulforudis audaxviator MP104C; Caldicellulosiruptor hydrothermalis 108; Clostridium phage c-st; Clostridium botulinum A3 str. Loch Maree; Clostridium botulinum Ba4 str. 657; Clostridium difficile QCD-63q42; Crocosphaera watsonii WH 8501; Cyanothece sp. ATCC 51142; Cyanothece sp. CCY0110; Cyanothece sp. PCC 7424; Cyanothece sp. PCC 7822; Exiguobacterium sibiricum 255-15; Finegoldia magna ATCC 29328; Ktedonobacter racemifer DSM 44963; Lactobacillus delbrueckii subsp. bulgaricus PB2003/044-T3-4; Lactobacillus salivarius ATCC 11741; Listeria innocua; Lyngbya sp. PCC 8106; Marinobacter sp. ELB17; Methanohalobium evestigatum Z-7303; Microcystis phage Ma-LMM01; Microcystis aeruginosa NIES-843; Microscilla marina ATCC 23134; Microcoleus chthonoplastes PCC 7420; Neisseria meningitidis; Nitrosococcus halophilus Nc4; Nocardiopsis dassonvillei subsp. dassonvillei DSM 43111; Nodularia spumigena CCY9414; Nostoc sp. PCC 7120; Oscillatoria sp. PCC 6506; Pelotomaculum_thermopropionicum SI; Petrotoga mobilis SJ95; Polaromonas naphthalenivorans CJ2; Polaromonas sp. JS666; Pseudoalteromonas haloplanktis TAC125; Streptomyces pristinaespiralis ATCC 25486; Streptomyces pristinaespiralis ATCC 25486; Streptococcus thermophilus; Streptomyces viridochromogenes DSM 40736; Streptosporangium roseum DSM 43021; Synechococcus sp. PCC 7335; and Thermosipho africanus TCF52B (Chylinski et al., RNA Biol., 2013; 10 (5): 726-737).

[0176] In some aspects, the Cas protein is a variant that lacks nuclease activity (i.e. is a dCas protein). In some embodiments, the Cas protein is mutated so that nuclease activity is reduced or eliminated. Such Cas proteins are referred to as deactivated Cas or dead Cas (dCas) or nuclease-inactive Cas (iCas) proteins, as referred to interchangeably herein. In some embodiments, the variant Cas protein is a variant Cas9 protein that lacks nuclease activity or that is a deactivated Cas9 (dCas9, or iCas9) protein.

[0177] In some embodiments, the Cas9 protein or a variant thereof is derived from a Staphylococcus aureus Cas9 (SaCas9) protein or a variant thereof. In some embodiments, the variant Cas9 is a Staphylococcus aureus dCas9 protein (dSaCas9) that comprises at least one amino acid mutation selected from D10A and N580A, with reference to numbering of positions of SEQ ID NO: 1461. In some embodiments, the variant Cas9 protein comprises the sequence set forth in SEQ ID NO:1462, or an amino acid sequence that has at least 90%, 91%, 92%, 93%, 94%, 95%, 96%, 97%, 98%, or 99% sequence identity thereto.

[0178] In some embodiments, the Cas9 protein or variant thereof is derived from a Streptococcus pyogenes Cas9 (SpCas9) protein or a variant thereof. In some embodiments, the variant Cas9 is a Streptococcus pyogenes dCas9 (dSpCas9) protein that comprises at least one amino acid mutation selected from D10A and H840A, with reference to numbering of positions of SEQ ID NO:1463. In some embodiments, the variant Cas9 protein comprises the sequence set forth in SEQ ID NO:1464, or an amino acid sequence that has at least 90%, 91%, 92%, 93%, 94%, 95%, 96%, 97%, 98%, or 99% sequence identity thereto.

ii. Guide RNAs

[0179] In some embodiments, the Cas protein (e.g. dCas9) is provided in combination or as a complex with one or more guide RNA (gRNA). In some aspects, the gRNA is a nucleic acid that promotes the specific targeting or homing of the gRNA/Cas RNP complex to the target site of the target gene, such as any described above. In some embodiments, a target site of a gRNA may be referred to as a protospacer.

[0180] Provided herein are gRNAs, such as gRNAs that target or bind to a target gene or DNA regulatory element thereof, such as any described above in Section I.A. In some embodiments, the gRNA is capable of complexing with the Cas protein or variant thereof. In some embodiments, the gRNA comprises a gRNA spacer sequence (i.e. a spacer sequence or a guide sequence) that is capable of hybridizing to the target site, or that is complementary to the target site, such as any target site described in Section I.A or further below. In some embodiments, the gRNA comprises a scaffold sequence that complexes with or binds to the Cas protein.

[0181] In some embodiments, the gRNAs provided herein are chimeric gRNAs. In general, gRNAs can be unimolecular (i.e. consisting of a single RNA molecule), or modular (comprising more than one, and typically two, separate RNA molecules). Modular gRNAs can be engineered to be unimolecular, wherein sequences from the separate modular RNA molecules are comprised in a single gRNA molecule, sometimes referred to as a chimeric gRNA, synthetic gRNA, or single gRNA. In some embodiments, the chimeric gRNA is a fusion of two non-coding RNA sequences: a crRNA sequence and a tracrRNA sequence, for example as described in WO 2013/176772 A1, or Jinek, M. et al. Science 337 (6096): 816-21 (2012). In some embodiments, the chimeric gRNA mimics the naturally occurring crRNA: tracrRNA duplex involved in the Type II Effector system, wherein the naturally occurring crRNA: tracrRNA duplex acts as a guide for the Cas9 protein.

[0182] In some aspects, the spacer sequence of a gRNA is a polynucleotide sequence comprising at least a portion that has sufficient complementarity with the target gene or DNA regulatory element thereof (e.g. any described in Section I.A) to hybridize with a target site in the target gene and direct sequence-specific binding of a CRISPR complex to the sequence of the target site. Full complementarity is not necessarily required, provided there is sufficient complementarity to cause hybridization and promote formation of a CRISPR complex. In some embodiments, the gRNA comprises a spacer sequence that is complementary, e.g., at least 80%, 85%, 90%, 95%, 98%, 99%, or 100% (e.g., fully complementary), to the target site. The strand of the target nucleic acid comprising the target site sequence may be referred to as the “complementary strand” of the target nucleic acid.

[0183] In some embodiments, the gRNA spacer sequence is between about 14 nucleotides (nt) and about 26 nt, or between 16 nt and 22 nt in length. In some embodiments, the gRNA spacer sequence is 14 nt, 15 nt, 16 nt, 17 nt, 18 nt, 19 nt, 20 nt, 21 nt or 22 nt, 23 nt, 24 nt, 25 nt, or 26 nt in length. In some embodiments, the gRNA spacer sequence is 18 nt, 19 nt, 20 nt, 21 nt or 22 nt in length. In some embodiments, the gRNA spacer sequence is 19 nt in length.

[0184] A target site of a gRNA may be referred to as a protospacer. In some aspects, the spacer is designed to target a protospacer with a specific protospacer-adjacent motif (PAM), i.e. a sequence immediately adjacent to the protospacer that contributes to and/or is required for Cas binding specificity. Different CRISPR/Cas systems have different PAM requirements for targeting. For example, in some embodiments, S. pyogenes Cas9 uses the PAM 5′-NGG-3′ (SEQ ID NO: 1459), where N is any nucleotide. In some embodiments, S. aureus Cas9 uses the PAM 5′-NNGRRT-3′ (SEQ ID NO: 1460), where N is any nucleotide, and R is G or A. N. meningitidis Cas9 uses the PAM 5′-NNNNGATT-3′ (SEQ ID NO: 1496), where N is any nucleotide. In some embodiments, C. jejuni Cas9 uses the PAM 5′-NNNNRYAC-3′ (SEQ ID NO: 1497), where N is any nucleotide, R is G or A, and Y is C or T. S. thermophilus uses the PAM 5′-NNAGAAW-3′ (SEQ ID NO: 1498), where N is any nucleotide and W is A or T. In some embodiments, F. Novicida Cas9 uses the PAM 5′-NGG-3′ (SEQ ID NO: 1459), where N is any nucleotide. In some embodiments, T. denticola Cas9 uses the PAM 5′-NAAAAC-3′ (SEQ ID NO: 1499), where N is any nucleotide. In some embodiments, Cas12a (also known as Cpf1) from various species, uses the PAM 5′-TTTV-3′ (SEQ ID NO: 1500). Cas proteins may use or be engineered to use different PAMs from those listed above. For example, mutated SpCas9 proteins may use the PAMs 5′-NGG-3′ (SEQ ID NO: 1459), 5′-NGAN-3′ (SEQ ID NO: 1501), 5′-NGNG-3′ (SEQ ID NO: 1502), 5′-NGAG-3′ (SEQ ID NO: 1503), or 5′-NGCG-3′ (SEQ ID NO: 1504). In some embodiments, the protospacer-adjacent motif (PAM) of a gRNA for complexing with S. pyogenes Cas9 or variant thereof is set forth in SEQ ID NO:1459. In some embodiments, the PAM of a gRNA for complexing with S. aureus Cas9 or variant thereof is set forth in SEQ ID NO: 1460.

[0185] A spacer sequence may be selected to reduce the degree of secondary structure within the spacer sequence. Secondary structure may be determined by any suitable polynucleotide folding algorithm.

[0186] In some embodiments, the gRNA (including the guide sequence) will comprise the base uracil (U), whereas DNA encoding the gRNA molecule will comprise the base thymine (T). While not wishing to be bound by theory, in some embodiments, it is believed that the complementarity of the guide sequence with the target sequence contributes to specificity of the interaction of the gRNA molecule/Cas molecule complex with a target nucleic acid. It is understood that in a guide sequence and target sequence pair, the uracil bases in the guide sequence will pair with the adenine bases in the target sequence.

[0187] In some embodiments, one, more than one, or all of the nucleotides of a gRNA can have a modification, e.g., to render the gRNA less susceptible to degradation and/or improve bio-compatibility. By way of non-limiting example, the backbone of the gRNA can be modified with a phosphorothioate, or other modification(s). In some cases, a nucleotide of the gRNA can comprise a 2′ modification, e.g., a 2-acetylation, e.g., a 2′ methylation, or other modification(s)

[0188] Methods for designing gRNAs and exemplary targeting domains can include those described in, e.g., International PCT Pub. Nos. WO 2014/197748 A2, WO 2016/130600 A2, WO 2017/180915 A2, WO 2021/226555 A2, WO 2013/176772 A1, WO 2014/152432 A2, WO 2014/093661 A2, WO 2014/093655 A2, WO 2015/089427 A1, WO 2016/049258 A2, WO 2016/123578 A1, WO 2021/076744 A1, WO 2014/191128 A1, WO 2015/161276 A2, WO 2017/193107 A2, and WO 2017/093969 A1.

[0189] In some embodiments, a gRNA provided herein targets a target site in a gene in a T cell or DNA regulatory element thereof, wherein the gene is selected from the list shown in Table 1, consisting of: BMP4, E2F7, ESRRG, LYL1, STAT5A, THAP10, ZNF362, ZSCAN1, ANHX, CPEB1, CSRNP1, EN2, EPAS1, IRX3, LHX8, NR5A2, PRDM16, RAX2, SCML4, SMAD1, SOX6, SUV39H1, TFDP1, ZNF287, ZNF438, ZNF681, ZNF853, BMP4, CARF, ESRRG, ESRRG, FOXR2, HOXA7, IRF9, KAT5, KLF5, NEUROD1, PAX6, PIN1, PURG, RARA, SNAPC5, STAT5A, TBX22, WT1, ZNF138, ZNF143, ZNF205, ZNF235, ZNF526, ZNF548, ZNF559, ZNF611, ZNF655, ZNF672, ZNF699, ZNF706, ZNF714, ZNF772, ZNF782, ZSCAN1, ZSCAN26, ADNP, AHRR, AKNA, ALX3, ALX4, AR, ARHGAP35, ARID3C, ARID5B, ASCL5, ATF6B, ATOH7, BARHL1, BARHL2, BATF, BBX, BHLHE40, BNC2, BRD4, BRD9, BSX, CCDC17, CDX1, CDX2, CDX4, CEBPB, CENPB, CLOCK, CREB3, CREB3L4, CSRNP3, CTCF, CUX1, CUX2, DACH2, DLX1, DLX4, DLX5, DLX6, DMRTB1, DNMT3B, DOTIL, DPF1, DR1, E2F2, E2F3, EBF3, EGR2, EHF, ELF5, ELMSAN1, EMX1, ETS2, ETV4, ETV4, ETV6, EZH1, FERD3L, FERD3L, FIZ1, FOS, FOSB, FOXA1, FOXA2, FOXA3, FOXC2, FOXD3, FOXE1, FOXJ3, FOXN2, FOXN4, FOXO1, FOXP3, FOXS1, GATA2, GATA3, GATAD2A, GCM2, GFI1, GLI2, GLYR1, GPBP1L1, GRHL1, GTF2B, GTF2I, HDAC2, HES2, HES7, HESX1, HEY1, HIF3A, HIVEP3, HLF, HLX, HMG20A, HMGA2, HMGN3, HMX2, HNF1A, HNF4G, HOXA1, HOXA11, HOXB1, HOXB2, HOXB3, HOXC12, HOXC9, HOXC9, HOXD9, HSF4, HSF5, IKZF1, IKZF2, IKZF3, IKZF4, IRF7, IRX3, ISL2, JRK, JRKL, KAT7, KDM1A, KDM2B, KDM5D, KLF14, KLF9, KMT2B, L3MBTL4, LEF1, LHX6, LHX9, LIN28A, LIN28A, LMX1A, MAF, MAFF, MBD3, MBD4, MBNL2, MED1, MED14, MED23, MED24, MEF2C, MEF2D, MEIS3, MESP1, MGA, MITF, MLX, MNX1, MYF5, MYOG, MYPOP, MYRFL, MYT1L, NCOR1, NEUROG1, NFAT5, NFATC2, NFATC3, NFE2L1, NFE2L3, NFIA, NFYB, NKX1-2, NKX2-3, NKX2-4, NKX2-5, NOTCH3, NOTO, NR1H2, NR1H4, NR112, NR2C2, NR2F1, OSR2, OTX1, OVOL1, PA2G4, PATZ1, PAX9, PAX9, PBX4, PGR, PITX1, PITX3, POU2F2, POU3F1, POU3F2, POU3F3, POU5F1, PRDM1, PRDM7, PRR12, PRRX1, RBCK1, RHOXF1, RUNX2, SALL3, SIM1, SIX1, SIX6, SKI, SKIL, SKOR1, SMAD2, SMAD5, SMYD3, SNAPC2, SOX1, SOX14, SOX30, SOX5, SOX6, SP2, SP3, SP5, SP8, SP9, SPIB, STAT5B, T, TBPL1, TBX5, TBX6, TCF12, TCF23, TCF3, TFAP2A, TFAP2E, TFDP2, TFDP3, TGIF2, TGIF2LX, THAP6, THRA, TIGD1, TIGD3, TIGD5, TLX3, TOX, TOX2, TRIM27, TRIM27, TRIM40, TRIM52, TSHZ2, VAX1, VEGFA, VSX1, WNT1, WNT3A, YBX1, YY1, YY2, ZBED5, ZBTB2, ZBTB21, ZBTB38, ZBTB4, ZBTB40, ZBTB42, ZBTB49, ZBTB7B, ZBTB7C, ZBTB8B, ZBTB9, ZC3H8, ZEB2, ZFHX2, ZFHX3, ZFP28, ZFP41, ZFP69B, ZFP90, ZGLP1, ZHX3, ZIC5, ZKSCAN1, ZKSCAN2, ZKSCAN7, ZNF107, ZNF121, ZNF132, ZNF135, ZNF140, ZNF141, ZNF222, ZNF225, ZNF229, ZNF230, ZNF248, ZNF25, ZNF26, ZNF267, ZNF280C, ZNF281, ZNF283, ZNF286B, ZNF304, ZNF317, ZNF318, ZNF320, ZNF33B, ZNF346, ZNF358, ZNF367, ZNF382, ZNF383, ZNF385B, ZNF391, ZNF415, ZNF423, ZNF43, ZNF432, ZNF433, ZNF436, ZNF441, ZNF443, ZNF461, ZNF462, ZNF468, ZNF473, ZNF483, ZNF486, ZNF491, ZNF507, ZNF514, ZNF519, ZNF540, ZNF543, ZNF546, ZNF549, ZNF555, ZNF562, ZNF567, ZNF569, ZNF574, ZNF577, ZNF596, ZNF610, ZNF616, ZNF621, ZNF626, ZNF627, ZNF629, ZNF630, ZNF630, ZNF641, ZNF645, ZNF658, ZNF660, ZNF662, ZNF677, ZNF682, ZNF697, ZNF703, ZNF705A, ZNF705B, ZNF705G, ZNF716, ZNF729, ZNF750, ZNF75A, ZNF765, ZNF771, ZNF773, ZNF774, ZNF778, ZNF784, ZNF789, ZNF804B, ZNF816, ZNF823, ZNF83, ZNF831, ZNF846, ZNF852, ZNF879, ZNF91, ZNF93, ZNF99, ZNF99, ZSCAN16, ZSCAN2, ZSCAN21, ZSCAN5A, and ZSCAN5B.

[0190] In some embodiments, the gRNA targets a target site that comprises a sequence selected from any one of SEQ ID NOS: 1-484, as shown in Table 1, a contiguous portion thereof of at least 14 nucleotides, a complementary sequence of any of the foregoing, or a sequence having at or at least 80%, 85%, 90%, 91%, 92%, 93%, 94%, 95%, 96%, 97%, 98%, 99%, 99.5%, 99.9%, or 100% sequence identity to any of the foregoing.

[0191] In some embodiments, the gRNA comprises a spacer sequence selected from any one of SEQ ID NOS: 485-968, as shown in Table 1, or a contiguous portion thereof of at least 14 nt, or a sequence having at or at least 80%, 85%, 90%, 91%, 92%, 93%, 94%, 95%, 96%, 97%, 98%, 99%, 99.5%, 99.9%, or 100% sequence identity to any of the foregoing.

[0192] In some embodiments, the gRNA further comprises a scaffold sequence. In some embodiments, the scaffold sequence comprises the sequence set forth in SEQ ID NO: 1454 (GUUUAAGAGCUAUGCUGGAAACAGCAUAGCAAGUUUAAAUAAGGCUAGUCCGU UAUCAACUUGAAAAAGUGGCACCGAGUCGGUGC), or a sequence having at or at least 80%, 85%, 90%, 91%, 92%, 93%, 94%, 95%, 96%, 97%, 98%, 99%, 99.5%, 99.9%, or 100% sequence identity to all or a portion thereof. In some embodiments, the scaffold sequence is set forth in SEQ ID NO: 1454. In some embodiments, a gRNA provided herein comprises a spacer sequence selected from any one of SEQ ID NOS: 485-968, as shown in Table 1. In some embodiments, the gRNA further comprises a scaffold sequence set forth in SEQ ID NO: 1454. In some embodiments, the gRNA comprises the sequence selected from any one of SEQ ID NOS: 969-1452, as shown in Table 2, or a sequence having at or at least 80%, 85%, 90%, 91%, 92%, 93%, 94%, 95%, 96%, 97%, 98%, 99%, 99.5%, 99.9%, or 100% sequence identity to any one of SEQ ID NO: 485-968. In some embodiments, the gRNA is set forth in any one of SEQ ID NOS: 969-1452. In some embodiments, any of the provided gRNA sequences is complexed with or is provided in combination with a Cas9. In some embodiments, the Cas9 is a dCas9. In some embodiments, the dCas9 is a dSpCas9, such as a dSpCas9 set forth in SEQ ID NO: 1464.

TABLE 1
Genes, target site sequences, and gRNA spacers

| | target site | target | | RNA |
|---|---|---|---|---|
| | (protospacer) | SEQ | RNA spacer | spacer |
| Gene | sequence | ID | sequence | SEQ ID |
| BMP4 | GACAGCCGGCGAGCAGGGG | 1 | GACAGCCGGCGAGCAGGGG | 485 |
| E2F7 | TTAGCGGGGACTACGATCC | 2 | UUAGCGGGGACUACGAUCC | 486 |
| ESRRG | TGGAGCCCGCCGCCTCCAG | 3 | UGGAGCCCGCCGCCUCCAG | 487 |
| LYL1 | GTTTCCTCCCTCTCACCCC | 4 | GUUUCCUCCCUCUCACCCC | 488 |
| STAT5A | CCGCGGTCCAGGGATAGGT | 5 | CCGCGGUCCAGGGAUAGGU | 489 |
| THAP10 | CTTCCGGTGACCAGAGGTA | 6 | CUUCCGGUGACCAGAGGUA | 490 |
| ZNF362 | GGGTAGGAAGTGTCTCCCG | 7 | GGGUAGGAAGUGUCUCCCG | 491 |
| ZSCAN1 | CCGCGCGCGGGCTTCGCTC | 8 | CCGCGCGCGGGCUUCGCUC | 492 |
| ANHX | CGGAAGGTGAGGGGCGCTA | 9 | CGGAAGGUGAGGGGCGCUA | 493 |
| CPEB1 | CAACATCGTCTTCCATGTC | 10 | CAACAUCGUCUUCCAUGUC | 494 |
| CSRNP1 | TCTGCGCGTCCGGCAGCGG | 11 | UCUGCGCGUCCGGCAGCGG | 495 |
| EN2 | CTCCGTGTGCGCCGCGGGA | 12 | CUCCGUGUGCGCCGCGGGA | 496 |
| EPAS1 | CGCCCCAGCGCTCCTGAGG | 13 | CGCCCCAGCGCUCCUGAGG | 497 |
| IRX3 | AAGCAGCGGAAGCGATCCT | 14 | AAGCAGCGGAAGCGAUCCU | 498 |
| LHX8 | CGAGCTACCAGCGCTCGGG | 15 | CGAGCUACCAGCGCUCGGG | 499 |
| NR5A2 | AGCATGACAAGGCGACCGC | 16 | AGCAUGACAAGGCGACCGC | 500 |
| PRDM16 | ACCATGCGATCCAAGGCGA | 17 | ACCAUGCGAUCCAAGGCGA | 501 |
| RAX2 | CCGGAGCCGAGCCAGGTCG | 18 | CCGGAGCCGAGCCAGGUCG | 502 |
| SCML4 | TGTGAGCTACTAACACGGG | 19 | UGUGAGCUACUAACACGGG | 503 |
| SMAD1 | GCTCCTCCGAGCAGACGGG | 20 | GCUCCUCCGAGCAGACGGG | 504 |
| SOX6 | TCTAGCCAGCCCCTAAGTC | 21 | UCUAGCCAGCCCCUAAGUC | 505 |
| SUV39H1 | TCTTCTCGCGAGGCCGGCT | 22 | UCUUCUCGCGAGGCCGGCU | 506 |
| TFDP1 | TCCCGGCGCCACTCGGCCC | 23 | UCCCGGCGCCACUCGGCCC | 507 |
| ZNF287 | CAGAGGCGCCGGGGTTTCT | 24 | CAGAGGCGCCGGGGUUUCU | 508 |
| ZNF438 | GTCACGGGCCCAGCAGTCG | 25 | GUCACGGGCCCAGCAGUCG | 509 |
| ZNF681 | AGGAGAAAGGACGCCCGGG | 26 | AGGAGAAAGGACGCCCGGG | 510 |
| ZNF853 | CCTCTGCGCTAGGGAGGTG | 27 | CCUCUGCGCUAGGGAGGUG | 511 |
| BMP4 | GAGGAAGGAAGATGCGAGA | 28 | GAGGAAGGAAGAUGCGAGA | 512 |
| CARF | TCCCAACCAGAGGCTCACT | 29 | UCCCAACCAGAGGCUCACU | 513 |
| ESRRG | TCTTCAGCTATACCAAGAG | 30 | UCUUCAGCUAUACCAAGAG | 514 |
| ESRRG | TGTGTTGTAGTGATCATGT | 31 | UGUGUUGUAGUGAUCAUGU | 515 |
| FOXR2 | ATCTAGGGAGCTTATCAGT | 32 | AUCUAGGGAGCUUAUCAGU | 516 |
| HOXA7 | GCCGTAGCCGGACGCAAAG | 33 | GCCGUAGCCGGACGCAAAG | 517 |
| IRF9 | GGTAAGATCAGCCAAGGAT | 34 | GGUAAGAUCAGCCAAGGAU | 518 |
| KAT5 | GAAGTGACGTCTCCCAGAG | 35 | GAAGUGACGUCUCCCAGAG | 519 |
| KLF5 | AGAGCCTGAGAGCACGGTG | 36 | AGAGCCUGAGAGCACGGUG | 520 |
| NEUROD1 | CAGGACCTACTAACAACAA | 37 | CAGGACCUACUAACAACAA | 521 |
| PAX6 | ATGTTGCGGAGTGATTAGT | 38 | AUGUUGCGGAGUGAUUAGU | 522 |
| PIN1 | TGCGCTTCTCCCAGCCGGG | 39 | UGCGCUUCUCCCAGCCGGG | 523 |
| PURG | GGTGTCCGAAGTCAGGCGG | 40 | GGUGUCCGAAGUCAGGCGG | 524 |
| PURG | TGGTCGTGAAGGGCATCGG | 41 | UGGUCGUGAAGGGCAUCGG | 525 |
| RARA | CATAGCGAGTCACGTGCGG | 42 | CAUAGCGAGUCACGUGCGG | 526 |
| SNAPC5 | TGCCGGGCCGACAGCAGCC | 43 | UGCCGGGCCGACAGCAGCC | 527 |
| STAT5A | CCTCATAAGTAACTAGGCT | 44 | CCUCAUAAGUAACUAGGCU | 528 |
| TBX22 | TTAGTGGGACATCAGTACA | 45 | UUAGUGGGACAUCAGUACA | 529 |
| WT1 | CAAGGCAGCGCCCACACCC | 46 | CAAGGCAGCGCCCACACCC | 530 |
| ZNF138 | TGCGTCCTCTTACTCCTAG | 47 | UGCGUCCUCUUACUCCUAG | 531 |
| ZNF143 | TGTCCTGGTGCATGGTGGT | 48 | UGUCCUGGUGCAUGGUGGU | 532 |
| ZNF205 | CTCCACAGCCTGCACGGGG | 49 | CUCCACAGCCUGCACGGGG | 533 |
| ZNF235 | AGAGGGCTCGGAGAAGTCT | 50 | AGAGGGCUCGGAGAAGUCU | 534 |
| ZNF526 | GATTGGTCGCCACGGGTAA | 51 | GAUUGGUCGCCACGGGUAA | 535 |
| ZNF548 | AGCACTGGGAGGACCGGTC | 52 | AGCACUGGGAGGACCGGUC | 536 |
| ZNF559 | CTGTCCTCAGGGGTCGAGG | 53 | CUGUCCUCAGGGGUCGAGG | 537 |
| ZNF611 | TGCGCTAACTAGGTTCCCA | 54 | UGCGCUAACUAGGUUCCCA | 538 |
| ZNF655 | CCGCGAGGTGAATGAACCA | 55 | CCGCGAGGUGAAUGAACCA | 539 |
| ZNF672 | CACCGGTTGCTGGGAAGAC | 56 | CACCGGUUGCUGGGAAGAC | 540 |
| ZNF699 | CGGACAAGGAGTGGCGGGG | 57 | CGGACAAGGAGUGGCGGGG | 541 |
| ZNF706 | CACTCTGGCAGCTGACCGG | 58 | CACUCUGGCAGCUGACCGG | 542 |
| ZNF714 | CTGACCTGGAGTCCTCTCA | 59 | CUGACCUGGAGUCCUCUCA | 543 |
| ZNF772 | TAGTCCACAGGCCTGATGG | 60 | UAGUCCACAGGCCUGAUGG | 544 |
| ZNF782 | GGGTCGGCTCGGAAAGTAG | 61 | GGGUCGGCUCGGAAAGUAG | 545 |
| ZSCAN1 | TCGCCGTAGGGGAGGGAAG | 62 | UCGCCGUAGGGGAGGGAAG | 546 |
| ZSCAN26 | TCCTTCTGCGATGCCTAAG | 63 | UCCUUCUGCGAUGCCUAAG | 547 |
| ADNP | TGTCTGCTGAGGGGAGACG | 64 | UGUCUGCUGAGGGGAGACG | 548 |
| AHRR | GCCAGGGCGCGCTGCCCCG | 65 | GCCAGGGCGCGCUGCCCCG | 549 |
| AKNA | CCAGGAAACCACCCGCGCT | 66 | CCAGGAAACCACCCGCGCU | 550 |
| ALX3 | CCTGCACCCGGCCCCTATG | 67 | CCUGCACCCGGCCCCUAUG | 551 |
| ALX4 | TGCGACACCGGGCTGTAGT | 68 | UGCGACACCGGGCUGUAGU | 552 |
| ANHX | AAGCGGGTCCCGGAGGGTG | 69 | AAGCGGGUCCCGGAGGGUG | 553 |
| AR | GCTTGCTGGGAGAGCGGGA | 70 | GCUUGCUGGGAGAGCGGGA | 554 |
| ARHGAP35 | CAGTGTGGTGGGATTATCT | 71 | CAGUGUGGUGGGAUUAUCU | 555 |
| ARID3C | AGAGGTATCAGGCAGAGAC | 72 | AGAGGUAUCAGGCAGAGAC | 556 |
| ARID5B | AGAAAGAGGAGCAGCGCCC | 73 | AGAAAGAGGAGCAGCGCCC | 557 |
| ASCL5 | TGGCTCCCGGTGCTGTGGC | 74 | UGGCUCCCGGUGCUGUGGC | 558 |
| ATF6B | GGCCTTGGGAACCGTCTCC | 75 | GGCCUUGGGAACCGUCUCC | 559 |
| ATOH7 | CTTCCTGCAAAGGAGTCTC | 76 | CUUCCUGCAAAGGAGUCUC | 560 |
| BARHL1 | TCTAATGCGCAGAGGAGGT | 77 | UCUAAUGCGCAGAGGAGGU | 561 |
| BARHL2 | TTTCTTCGCTGGTTCGGGG | 78 | UUUCUUCGCUGGUUCGGGG | 562 |
| BATF | CAGAGTGAGGAGGACGCAG | 79 | CAGAGUGAGGAGGACGCAG | 563 |
| BBX | AGCCCTCAGCGGCCAGTCA | 80 | AGCCCUCAGCGGCCAGUCA | 564 |
| BHLHE40 | TCCGACTCAGCGCACAGAC | 81 | UCCGACUCAGCGCACAGAC | 565 |
| BNC2 | AGAGGAGACCAAGAGGCGG | 82 | AGAGGAGACCAAGAGGCGG | 566 |
| BRD4 | CAGTGGCAACACCCACAAG | 83 | CAGUGGCAACACCCACAAG | 567 |
| BRD9 | CCAGCGAGCTCGGCAACCT | 84 | CCAGCGAGCUCGGCAACCU | 568 |
| BSX | GACAAGGGCCGGGACGAAG | 85 | GACAAGGGCCGGGACGAAG | 569 |
| CCDC17 | TGGGTGGCTAACAGAGCTG | 86 | UGGGUGGCUAACAGAGCUG | 570 |
| CDX1 | CGGTTGCTCGTCGTCGGGG | 87 | CGGUUGCUCGUCGUCGGGG | 571 |
| CDX2 | CCTTCCCACTAGGCTGCAG | 88 | CCUUCCCACUAGGCUGCAG | 572 |
| CDX4 | GTTTCTTACGAGGGTATCC | 89 | GUUUCUUACGAGGGUAUCC | 573 |
| CEBPB | GTGGCCGCTATTAGTGAGG | 90 | GUGGCCGCUAUUAGUGAGG | 574 |
| CENPB | CGGGCCGGGGGCACCTCCG | 91 | CGGGCCGGGGGCACCUCCG | 575 |
| CLOCK | CGCCGCCAAGGAAGCCAAC | 92 | CGCCGCCAAGGAAGCCAAC | 576 |
| CREB3 | TGGGAGGCGGGTCCGGAGA | 93 | UGGGAGGCGGGUCCGGAGA | 577 |
| CREB3L4 | AAAGCGAGGGCTACAGAAC | 94 | AAAGCGAGGGCUACAGAAC | 578 |
| CSRNP3 | CACGGCATCAGCCTCACTG | 95 | CACGGCAUCAGCCUCACUG | 579 |
| CTCF | CGCGGAGCTGCTTCTTTGG | 96 | CGCGGAGCUGCUUCUUUGG | 580 |
| CUX1 | TGAGCGGCTGATAGAGAGG | 97 | UGAGCGGCUGAUAGAGAGG | 581 |
| CUX2 | GCGCGCCCTGGGCGCATTG | 98 | GCGCGCCCUGGGCGCAUUG | 582 |
| DACH2 | GGCCCGGAATAAGCCCCCC | 99 | GGCCCGGAAUAAGCCCCCC | 583 |
| DLX1 | CTCCCCAGGAACCAACCAG | 100 | CUCCCCAGGAACCAACCAG | 584 |
| DLX4 | AAGCGGAAGCCAGCACGCA | 101 | AAGCGGAAGCCAGCACGCA | 585 |
| DLX5 | GCCGCGGCGAGGAGGAGAC | 102 | GCCGCGGCGAGGAGGAGAC | 586 |
| DLX6 | GAGTGGCTCATGTAGGGGT | 103 | GAGUGGCUCAUGUAGGGGU | 587 |
| DMRTB1 | AGGCTGGGCATCGCCACGG | 104 | AGGCUGGGCAUCGCCACGG | 588 |
| DNMT3B | GACTCGCCCCCAATCCTGG | 105 | GACUCGCCCCCAAUCCUGG | 589 |
| DOTIL | GCTTCACGCCGGCCCAAGA | 106 | GCUUCACGCCGGCCCAAGA | 590 |
| DPF1 | CTACGATTTCATTCATTCT | 107 | CUACGAUUUCAUUCAUUCU | 591 |
| DR1 | GTAGCCCGAACGCAGATCG | 108 | GUAGCCCGAACGCAGAUCG | 592 |
| E2F2 | GCGATGCGCTGGGATGGGG | 109 | GCGAUGCGCUGGGAUGGGG | 593 |
| E2F3 | CCCGGAGGGCCGAACAGAC | 110 | CCCGGAGGGCCGAACAGAC | 594 |
| EBF3 | GGAAAGGGTCCATTCCTCG | 111 | GGAAAGGGUCCAUUCCUCG | 595 |
| EGR2 | CAGCAGCCGGAACACAGAC | 112 | CAGCAGCCGGAACACAGAC | 596 |
| EHF | AATCTCACCAGCTCCTATA | 113 | AAUCUCACCAGCUCCUAUA | 597 |
| ELF5 | GTGGCTAGGTCCAAAGAGG | 114 | GUGGCUAGGUCCAAAGAGG | 598 |
| ELF5 | AGGCTTTCAAGGCAAGAGA | 115 | AGGCUUUCAAGGCAAGAGA | 599 |
| ELMSAN1 | GCGCCGTTGGCCTGAGGTA | 116 | GCGCCGUUGGCCUGAGGUA | 600 |
| EMX1 | AGGCCGCTAGAATGGACCC | 117 | AGGCCGCUAGAAUGGACCC | 601 |
| ETS2 | CTCCAGAGACTGACGAGTG | 118 | CUCCAGAGACUGACGAGUG | 602 |
| ETV4 | CCTCAGGTGAGGCTGCGGG | 119 | CCUCAGGUGAGGCUGCGGG | 603 |
| ETV4 | CTTTTGTGAATGGAACCCC | 120 | CUUUUGUGAAUGGAACCCC | 604 |
| ETV6 | CGGCTGCCGGGAGAGATGC | 121 | CGGCUGCCGGGAGAGAUGC | 605 |
| EZH1 | ACCCGCGGCTCGGGATGGA | 122 | ACCCGCGGCUCGGGAUGGA | 606 |
| FERD3L | CACATCCATTGGCAGATGG | 123 | CACAUCCAUUGGCAGAUGG | 607 |
| FERD3L | AACAAGGAACTGTCCCGGG | 124 | AACAAGGAACUGUCCCGGG | 608 |
| FIZ1 | CCGACATTTTGGGCAGCGG | 125 | CCGACAUUUUGGGCAGCGG | 609 |
| FOS | TAGTAAGAGAGGCTATCCC | 126 | UAGUAAGAGAGGCUAUCCC | 610 |
| FOSB | CAGAGCTACGGCCACGGCA | 127 | CAGAGCUACGGCCACGGCA | 611 |
| FOXA1 | GCAGCCCGCTCACTTCCCG | 128 | GCAGCCCGCUCACUUCCCG | 612 |
| FOXA2 | AGCTACTATGCAGAGCCCG | 129 | AGCUACUAUGCAGAGCCCG | 613 |
| FOXA3 | CTCGGGACAGCCGTACCCC | 130 | CUCGGGACAGCCGUACCCC | 614 |
| FOXC2 | CGGCGCTCGGGCCGAGCAG | 131 | CGGCGCUCGGGCCGAGCAG | 615 |
| FOXD3 | CGCAGGGTGCAGGCCGTAG | 132 | CGCAGGGUGCAGGCCGUAG | 616 |
| FOXE1 | TCCCCTGCACACACCGGAC | 133 | UCCCCUGCACACACCGGAC | 617 |
| FOXJ3 | GGCCTCGACCGCTCGCAGT | 134 | GGCCUCGACCGCUCGCAGU | 618 |
| FOXN2 | AGTCGCCTCCGGGAAGACG | 135 | AGUCGCCUCCGGGAAGACG | 619 |
| FOXN4 | ACGCGAGGGGCGAGCGCGA | 136 | ACGCGAGGGGCGAGCGCGA | 620 |
| FOXO1 | CCGCAGGAGAGCCAAGAGG | 137 | CCGCAGGAGAGCCAAGAGG | 621 |
| FOXP3 | AGAGCAGGGACACTCACCT | 138 | AGAGCAGGGACACUCACCU | 622 |
| FOXS1 | ATGACCGCAAGCCAGGCAA | 139 | AUGACCGCAAGCCAGGCAA | 623 |
| GATA2 | GCGAGGCCAGCGTCGCCCC | 140 | GCGAGGCCAGCGUCGCCCC | 624 |
| GATA3 | TCGCTACCCAGGTTGGTAC | 141 | UCGCUACCCAGGUUGGUAC | 625 |
| GATAD2A | CTCCATGTGTGCGGCCGAG | 142 | CUCCAUGUGUGCGGCCGAG | 626 |
| GCM2 | CAATGGTTATGGACCCGGG | 143 | CAAUGGUUAUGGACCCGGG | 627 |
| GFI1 | GGCTCGGCGGACCTACCTG | 144 | GGCUCGGCGGACCUACCUG | 628 |
| GLI2 | TTGCTTGCCAAGGGGCCCA | 145 | UUGCUUGCCAAGGGGCCCA | 629 |
| GLYR1 | CGGCTGTGAGTCTGCGGCT | 146 | CGGCUGUGAGUCUGCGGCU | 630 |
| GPBP1L1 | CAGCTTGTCGACCCGGCAG | 147 | CAGCUUGUCGACCCGGCAG | 631 |
| GRHL1 | ACAGTACACCCGATCCGGG | 148 | ACAGUACACCCGAUCCGGG | 632 |
| GTF2B | GCCTCCGGGCAGCCTCGTA | 149 | GCCUCCGGGCAGCCUCGUA | 633 |
| GTF2I | GCGAGGGGCCCGTGCGTGT | 150 | GCGAGGGGCCCGUGCGUGU | 634 |
| HDAC2 | GCTCGGTACCACCCGGCAG | 151 | GCUCGGUACCACCCGGCAG | 635 |
| HES2 | GGGTCTCAACTGTTACGTG | 152 | GGGUCUCAACUGUUACGUG | 636 |
| HES7 | GGAGGAGCAATGGTCACCC | 153 | GGAGGAGCAAUGGUCACCC | 637 |
| HESX1 | GCTCTGCCCCACGTGTATA | 154 | GCUCUGCCCCACGUGUAUA | 638 |
| HEY1 | GAGCTGGACGAGACCATCG | 155 | GAGCUGGACGAGACCAUCG | 639 |
| HIF3A | TACGAGTGGGTGCGCACGG | 156 | UACGAGUGGGUGCGCACGG | 640 |
| HIVEP3 | GGAGAACTGTGTTGGAGGG | 157 | GGAGAACUGUGUUGGAGGG | 641 |
| HLF | AGGAAAAGTGATAAAAGAG | 158 | AGGAAAAGUGAUAAAAGAG | 642 |
| HLX | GCAGTAAGCGGCCGACCAG | 159 | GCAGUAAGCGGCCGACCAG | 643 |
| HMG20A | AAGTGAAGGCGATTGAGAG | 160 | AAGUGAAGGCGAUUGAGAG | 644 |
| HMGA2 | ATCAACACCGGACGTCCAG | 161 | AUCAACACCGGACGUCCAG | 645 |
| HMGA2 | TTCGGGAGATGAGGTGATA | 162 | UUCGGGAGAUGAGGUGAUA | 646 |
| HMGA2 | GTCCCTGGGCTGAAGTGGA | 163 | GUCCCUGGGCUGAAGUGGA | 647 |
| HMGN3 | CCTCATTGGAGCAGCAGGG | 164 | CCUCAUUGGAGCAGCAGGG | 648 |
| HMX2 | GGGACATGCAGGCACCGGA | 165 | GGGACAUGCAGGCACCGGA | 649 |
| HNF1A | ATGTAAACAGAACAGGCAG | 166 | AUGUAAACAGAACAGGCAG | 650 |
| HNF4G | AGATTCTATATAATTCAAG | 167 | AGAUUCUAUAUAAUUCAAG | 651 |
| HNF4G | AGCCGCCCGAGGGGAACCG | 168 | AGCCGCCCGAGGGGAACCG | 652 |
| HOXA1 | TTCTTCTCCGGCCCCATGG | 169 | UUCUUCUCCGGCCCCAUGG | 653 |
| HOXA11 | GGCGCGAAGACGGGGTCTG | 170 | GGCGCGAAGACGGGGUCUG | 654 |
| HOXB1 | ATACTGCCGAAAGGTTGTA | 171 | AUACUGCCGAAAGGUUGUA | 655 |
| HOXB2 | GGTGGGGAGATTTTCCCCT | 172 | GGUGGGGAGAUUUUCCCCU | 656 |
| HOXB3 | TTAACTGCTCGCTGTGGTG | 173 | UUAACUGCUCGCUGUGGUG | 657 |
| HOXC12 | ACACTGGGCTGCCGAGGTA | 174 | ACACUGGGCUGCCGAGGUA | 658 |
| HOXC9 | CCGTACGGGTGATATACCA | 175 | CCGUACGGGUGAUAUACCA | 659 |
| HOXC9 | GGCTTGGGCGCGAAGCTAC | 176 | GGCUUGGGCGCGAAGCUAC | 660 |
| HOXD9 | CGGCGGACAGTGTAATGTT | 177 | CGGCGGACAGUGUAAUGUU | 661 |
| HSF4 | GCATGGTGCAGTCTCGGCC | 178 | GCAUGGUGCAGUCUCGGCC | 662 |
| HSF5 | CAGGGCGAGGCGAAGGCCG | 179 | CAGGGCGAGGCGAAGGCCG | 663 |
| IKZF1 | TGCGCCGCGCGGGGACCCA | 180 | UGCGCCGCGCGGGGACCCA | 664 |
| IKZF2 | GCAGTGGATCTGTAGCTAA | 181 | GCAGUGGAUCUGUAGCUAA | 665 |
| IKZF3 | GCGCGCTGAGTCCAGGCGA | 182 | GCGCGCUGAGUCCAGGCGA | 666 |
| IKZF4 | TCCCTCGCCGTTTCCAAGG | 183 | UCCCUCGCCGUUUCCAAGG | 667 |
| IRF7 | CTCTGGCACCCAGGTACTG | 184 | CUCUGGCACCCAGGUACUG | 668 |
| IRX3 | GTAAGGCAGCCAAAAGTTG | 185 | GUAAGGCAGCCAAAAGUUG | 669 |
| ISL2 | ACTAACTCCTACTGCCCCG | 186 | ACUAACUCCUACUGCCCCG | 670 |
| JRK | AGTGGCCGGCACTTCCGGC | 187 | AGUGGCCGGCACUUCCGGC | 671 |
| JRK | TCCTGACCGTCATCAGCAA | 188 | UCCUGACCGUCAUCAGCAA | 672 |
| JRKL | GACTGCCGCGCGATAGTCA | 189 | GACUGCCGCGCGAUAGUCA | 673 |
| KAT7 | GCTCCAGACGCTGAGAGGC | 190 | GCUCCAGACGCUGAGAGGC | 674 |
| KDM1A | CACGGAGCGACAGAGCGAG | 191 | CACGGAGCGACAGAGCGAG | 675 |
| KDM2B | CTCGGCTTCCATACCTATA | 192 | CUCGGCUUCCAUACCUAUA | 676 |
| KDM5D | AACTAGGATCCCTGACGAT | 193 | AACUAGGAUCCCUGACGAU | 677 |
| KLF14 | CTCGGCGGCGAAGTAGTCC | 194 | CUCGGCGGCGAAGUAGUCC | 678 |
| KLF9 | CAAGGGAGCCGGCTCAGAG | 195 | CAAGGGAGCCGGCUCAGAG | 679 |
| KMT2B | CATCTTGGCACCGTGAGAG | 196 | CAUCUUGGCACCGUGAGAG | 680 |
| KMT2B | GGGCCAAAAAAGTAAAGAT | 197 | GGGCCAAAAAAGUAAAGAU | 681 |
| L3MBTL4 | ACGCCGACCGAGCTACAGG | 198 | ACGCCGACCGAGCUACAGG | 682 |
| LEF1 | GCTCTCGGGCCGAGGAACC | 199 | GCUCUCGGGCCGAGGAACC | 683 |
| LHX6 | AGAAGCTGGCGGACATGAC | 200 | AGAAGCUGGCGGACAUGAC | 684 |
| LHX9 | GGGAACTTGCAAGCAGCCA | 201 | GGGAACUUGCAAGCAGCCA | 685 |
| LIN28A | AAGTCCGAAGGCAAAGGGT | 202 | AAGUCCGAAGGCAAAGGGU | 686 |
| LIN28A | CGTGCGCGCCAGACTACGT | 203 | CGUGCGCGCCAGACUACGU | 687 |
| LMX1A | CCTCCGGCTGCAGTCTCGG | 204 | CCUCCGGCUGCAGUCUCGG | 688 |
| MAF | AGAGGTGCAGCCCGACTGG | 205 | AGAGGUGCAGCCCGACUGG | 689 |
| MAFF | CCCGGTTCAGAGCGACCTG | 206 | CCCGGUUCAGAGCGACCUG | 690 |
| MBD3 | AGAAGTGCCCAGAAGGTCG | 207 | AGAAGUGCCCAGAAGGUCG | 691 |
| MBD4 | CCGGTGCCGTGAGCTGAAG | 208 | CCGGUGCCGUGAGCUGAAG | 692 |
| MBNL2 | GAAAGCCGTCTGCCGTATC | 209 | GAAAGCCGUCUGCCGUAUC | 693 |
| MED1 | AAGAAGAGAAGGGTGCTCG | 210 | AAGAAGAGAAGGGUGCUCG | 694 |
| MED14 | CTGCAGAGGACCTTCCGAC | 211 | CUGCAGAGGACCUUCCGAC | 695 |
| MED23 | AAGCGACGCCGAGGAGCTA | 212 | AAGCGACGCCGAGGAGCUA | 696 |
| MED24 | TGTGCGGTAGGCTTAAATT | 213 | UGUGCGGUAGGCUUAAAUU | 697 |
| MEF2C | TAGCAGCCCGAAGATGTCT | 214 | UAGCAGCCCGAAGAUGUCU | 698 |
| MEF2D | CGGGAGTCGAGGCCGACGT | 215 | CGGGAGUCGAGGCCGACGU | 699 |
| MEIS3 | CAACACCGCGGGCCGTCAG | 216 | CAACACCGCGGGCCGUCAG | 700 |
| MESP1 | CTGGAGACTCTCCTCGCTG | 217 | CUGGAGACUCUCCUCGCUG | 701 |
| MESP1 | GCCTAGCACGGCCGACAGG | 218 | GCCUAGCACGGCCGACAGG | 702 |
| MGA | GACCACAGGGGCGCGCCAA | 219 | GACCACAGGGGCGCGCCAA | 703 |
| MITF | TTGGAATTATAGAAAGTAG | 220 | UUGGAAUUAUAGAAAGUAG | 704 |
| MLX | CCTTGACCCAAGGGTCCTC | 221 | CCUUGACCCAAGGGUCCUC | 705 |
| MNX1 | GCGCGGGTCCCCACCACGG | 222 | GCGCGGGUCCCCACCACGG | 706 |
| MYF5 | CCGATGGGCAAATCCCGGG | 223 | CCGAUGGGCAAAUCCCGGG | 707 |
| MYOG | CGGGGTTCCTGGTAGAAGT | 224 | CGGGGUUCCUGGUAGAAGU | 708 |
| MYPOP | GGAGCCGGTGAGTGACCCG | 225 | GGAGCCGGUGAGUGACCCG | 709 |
| MYRFL | CTTCATTATCAGAAAGTAG | 226 | CUUCAUUAUCAGAAAGUAG | 710 |
| MYTIL | GTGCTTCAACAAGACTGCA | 227 | GUGCUUCAACAAGACUGCA | 711 |
| NCOR1 | TCCCGGGGCAGCAGCCGCT | 228 | UCCCGGGGCAGCAGCCGCU | 712 |
| NEUROG1 | CTCGTGTGAGCACCGAGTG | 229 | CUCGUGUGAGCACCGAGUG | 713 |
| NFAT5 | GTCCCCGTCCCGCCGGGGG | 230 | GUCCCCGUCCCGCCGGGGG | 714 |
| NFATC2 | GCGATCCGGCTTACTCCAG | 231 | GCGAUCCGGCUUACUCCAG | 715 |
| NFATC2 | AGAGGCTGCGTTCAGACTG | 232 | AGAGGCUGCGUUCAGACUG | 716 |
| NFATC3 | GAGGCTTAGGCACCGGTGG | 233 | GAGGCUUAGGCACCGGUGG | 717 |
| NFE2L1 | CCCTGGAGGCTAGAAGCTC | 234 | CCCUGGAGGCUAGAAGCUC | 718 |
| NFE2L3 | GGGTCCGCACGTGTCACCC | 235 | GGGUCCGCACGUGUCACCC | 719 |
| NFIA | TCCACGCCGCGGCTTACCT | 236 | UCCACGCCGCGGCUUACCU | 720 |
| NFYB | CCCCGGGCCCGGAGCTCAA | 237 | CCCCGGGCCCGGAGCUCAA | 721 |
| NKX1-2 | CGGGAAGCCAGGAAAAGTT | 238 | CGGGAAGCCAGGAAAAGUU | 722 |
| NKX2-3 | GTCTGTCAAAAGCCCGACT | 239 | GUCUGUCAAAAGCCCGACU | 723 |
| NKX2-4 | GCCTGTGACGAGGAGTCGG | 240 | GCCUGUGACGAGGAGUCGG | 724 |
| NKX2-5 | GCCAGCTCTGGATGTGTCC | 241 | GCCAGCUCUGGAUGUGUCC | 725 |
| NOTCH3 | TGGGCTCCGGGCGCGTCCC | 242 | UGGGCUCCGGGCGCGUCCC | 726 |
| NOTO | CAGGAGGTTCCCAGACAAC | 243 | CAGGAGGUUCCCAGACAAC | 727 |
| NOTO | CCTGGGGCTAGGCATGACG | 244 | CCUGGGGCUAGGCAUGACG | 728 |
| NR1H2 | GCGGGGTTGCCGGAAGAAG | 245 | GCGGGGUUGCCGGAAGAAG | 729 |
| NR1H4 | AAATCGCTGGGATCTGGAG | 246 | AAAUCGCUGGGAUCUGGAG | 730 |
| NR112 | AATACTCCTGTCCTGAACA | 247 | AAUACUCCUGUCCUGAACA | 731 |
| NR2C2 | CCGCCGCCCGCGCGCTGGT | 248 | CCGCCGCCCGCGCGCUGGU | 732 |
| NR2F1 | GAATGGAGTAAAAGAGACA | 249 | GAAUGGAGUAAAAGAGACA | 733 |
| NR5A2 | TCCGGCGAAAAGAAGGAAG | 250 | UCCGGCGAAAAGAAGGAAG | 734 |
| OSR2 | GCCCAAGACTCCCGGCCTG | 251 | GCCCAAGACUCCCGGCCUG | 735 |
| OTX1 | CACTCCCGGTGCAACGTGG | 252 | CACUCCCGGUGCAACGUGG | 736 |
| OVOL1 | AACAGGGAAGGAGTCGCTA | 253 | AACAGGGAAGGAGUCGCUA | 737 |
| PA2G4 | CCCAGGCTGAAGTCTATGG | 254 | CCCAGGCUGAAGUCUAUGG | 738 |
| PATZ1 | CTGTGGAGCCAGAACTGGG | 255 | CUGUGGAGCCAGAACUGGG | 739 |
| PAX9 | CTGTCAGAGCCGGGAAGGG | 256 | CUGUCAGAGCCGGGAAGGG | 740 |
| PAX9 | GACACGACCGGAGCCCTGC | 257 | GACACGACCGGAGCCCUGC | 741 |
| PBX4 | TGGAGGCCAGACTGACGAG | 258 | UGGAGGCCAGACUGACGAG | 742 |
| PGR | CCACAGCTGTCACTAATCG | 259 | CCACAGCUGUCACUAAUCG | 743 |
| PITX1 | AGACTCTGCCGGCGCCGTC | 260 | AGACUCUGCCGGCGCCGUC | 744 |
| PITX3 | CAGGAGCGCCCGAGCGGAG | 261 | CAGGAGCGCCCGAGCGGAG | 745 |
| PITX3 | TCGGGCGCTCCTGGACTCT | 262 | UCGGGCGCUCCUGGACUCU | 746 |
| PITX3 | GCTGCGGCGGCGATCTAGA | 263 | GCUGCGGCGGCGAUCUAGA | 747 |
| POU2F2 | ATGGTTCACTCCAGCATGG | 264 | AUGGUUCACUCCAGCAUGG | 748 |
| POU3F1 | GCCCGCAGACGGAGCGGAG | 265 | GCCCGCAGACGGAGCGGAG | 749 |
| POU3F2 | AGTCCGGCTCCGAGAGTCA | 266 | AGUCCGGCUCCGAGAGUCA | 750 |
| POU3F3 | GCTGTTCCCCGGCAGGTAG | 267 | GCUGUUCCCCGGCAGGUAG | 751 |
| POU5F1 | AGGCAAGTGAGCTTCGACG | 268 | AGGCAAGUGAGCUUCGACG | 752 |
| PRDM1 | GCCTCTCCGCAACACTGGA | 269 | GCCUCUCCGCAACACUGGA | 753 |
| PRDM16 | GCCGACACCATGCGATCCA | 270 | GCCGACACCAUGCGAUCCA | 754 |
| PRDM7 | GCGAAGCCAGACTCCCAGC | 271 | GCGAAGCCAGACUCCCAGC | 755 |
| PRR12 | TCCTCCTCCTCTGCGCTCA | 272 | UCCUCCUCCUCUGCGCUCA | 756 |
| PRRX1 | GCGGCCGCTTGGACAGCCC | 273 | GCGGCCGCUUGGACAGCCC | 757 |
| RBCK1 | AGGCCCCAGTTCTTCGCAA | 274 | AGGCCCCAGUUCUUCGCAA | 758 |
| RHOXF1 | GAAGAAAAGGGCCAATAGG | 275 | GAAGAAAAGGGCCAAUAGG | 759 |
| RUNX2 | CTGACTCTGTTGGTCTCGG | 276 | CUGACUCUGUUGGUCUCGG | 760 |
| SALL3 | GGATGCGCGCGTCCGGGAG | 277 | GGAUGCGCGCGUCCGGGAG | 761 |
| SIM1 | GTTCACTATTATTCCTAAT | 278 | GUUCACUAUUAUUCCUAAU | 762 |
| SIX1 | GGCAACTAGCAGCATCCAC | 279 | GGCAACUAGCAGCAUCCAC | 763 |
| SIX6 | GGGAGCGGACGACCCCGAC | 280 | GGGAGCGGACGACCCCGAC | 764 |
| SKI | TGGATGTGGCGCCGGGCCC | 281 | UGGAUGUGGCGCCGGGCCC | 765 |
| SKIL | TCGCTAGGCGGGTGTTCCA | 282 | UCGCUAGGCGGGUGUUCCA | 766 |
| SKOR1 | CGCCATGCGCTCCAGGCTT | 283 | CGCCAUGCGCUCCAGGCUU | 767 |
| SMAD2 | GGACCCCCCGGATCTGACG | 284 | GGACCCCCCGGAUCUGACG | 768 |
| SMAD5 | CGCGGGCGAGGGGAACTGG | 285 | CGCGGGCGAGGGGAACUGG | 769 |
| SMYD3 | TACGCACCCGAGAAGGCAG | 286 | UACGCACCCGAGAAGGCAG | 770 |
| SNAPC2 | GCGCCTGCCTCTTTCTGAG | 287 | GCGCCUGCCUCUUUCUGAG | 771 |
| SOX1 | GAGCATAGACGGCCGGGGT | 288 | GAGCAUAGACGGCCGGGGU | 772 |
| SOX14 | CGAGGGGAGCGCAGAACCC | 289 | CGAGGGGAGCGCAGAACCC | 773 |
| SOX30 | CATCCGCCGTGGTGAGACC | 290 | CAUCCGCCGUGGUGAGACC | 774 |
| SOX5 | GGTCGCTTGGAAGACATCC | 291 | GGUCGCUUGGAAGACAUCC | 775 |
| SOX6 | AATGGAGAGGTGGCTTGCT | 292 | AAUGGAGAGGUGGCUUGCU | 776 |
| SP2 | AGGAAGATGTCGTAATGAG | 293 | AGGAAGAUGUCGUAAUGAG | 777 |
| SP3 | TAGCGGCCAGCAGAGCGAG | 294 | UAGCGGCCAGCAGAGCGAG | 778 |
| SP5 | GCGCGGCGAGGGGCAAGGG | 295 | GCGCGGCGAGGGGCAAGGG | 779 |
| SP8 | AAAAAGATCCTCTGAGAGG | 296 | AAAAAGAUCCUCUGAGAGG | 780 |
| SP9 | CTATGGCCACGTCTATACT | 297 | CUAUGGCCACGUCUAUACU | 781 |
| SPIB | GAGGCTGCACAGTAAGTGA | 298 | GAGGCUGCACAGUAAGUGA | 782 |
| STAT5B | GCGGCGCGGCCCTGACGGG | 299 | GCGGCGCGGCCCUGACGGG | 783 |
| T | CCGGCGTCGGGTGTCCCCG | 300 | CCGGCGUCGGGUGUCCCCG | 784 |
| TBPL1 | TATTGTCGCGGGGAAGCTG | 301 | UAUUGUCGCGGGGAAGCUG | 785 |
| TBX5 | GTACCTCCCAGCTCAAGGT | 302 | GUACCUCCCAGCUCAAGGU | 786 |
| TBX6 | TCGCGCCAGGGTTTCCCGA | 303 | UCGCGCCAGGGUUUCCCGA | 787 |
| TCF12 | CCCCCCGAATAGAACTTGT | 304 | CCCCCCGAAUAGAACUUGU | 788 |
| TCF23 | AGGACAAGGCAGGACCCGT | 305 | AGGACAAGGCAGGACCCGU | 789 |
| TCF3 | TAGCGGGCCGGAGCCGACG | 306 | UAGCGGGCCGGAGCCGACG | 790 |
| TFAP2A | CCGCCGCTAAGAAAAGAGG | 307 | CCGCCGCUAAGAAAAGAGG | 791 |
| TFAP2A | CCAGAGAGTAGCTCCACTT | 308 | CCAGAGAGUAGCUCCACUU | 792 |
| TFAP2E | CCATGGAGGCAGGACGGAC | 309 | CCAUGGAGGCAGGACGGAC | 793 |
| TFDP2 | AGTCTTTGTTACCATTCAG | 310 | AGUCUUUGUUACCAUUCAG | 794 |
| TFDP3 | GGTGTGAACGGCCACGGGG | 311 | GGUGUGAACGGCCACGGGG | 795 |
| TGIF2 | TCCCTGTCGGAGAGATCGG | 312 | UCCCUGUCGGAGAGAUCGG | 796 |
| TGIF2LX | ATATGGAGGCCGCTGCGGA | 313 | AUAUGGAGGCCGCUGCGGA | 797 |
| THAP6 | CAGGCTCCCCGCCACCGGA | 314 | CAGGCUCCCCGCCACCGGA | 798 |
| THRA | TGCTGGGGGCGTCCATGGG | 315 | UGCUGGGGGCGUCCAUGGG | 799 |
| TIGD1 | CGGGCGGGTCACAAGGACC | 316 | CGGGCGGGUCACAAGGACC | 800 |
| TIGD3 | GGCGGCGACAGCAGAACAG | 317 | GGCGGCGACAGCAGAACAG | 801 |
| TIGD5 | CCATCGAGCGCGTCAAGGG | 318 | CCAUCGAGCGCGUCAAGGG | 802 |
| TLX3 | CCGACGGCGCCAGCTACCT | 319 | CCGACGGCGCCAGCUACCU | 803 |
| TOX | CGGAACAGAGTGAGGTGTC | 320 | CGGAACAGAGUGAGGUGUC | 804 |
| TOX2 | CGCGGGCGCCGAGGGGTAC | 321 | CGCGGGCGCCGAGGGGUAC | 805 |
| TRIM27 | GCTCTCGCTTAGGGGGCAC | 322 | GCUCUCGCUUAGGGGGCAC | 806 |
| TRIM27 | AGGCTCGCGGCCACGCTAG | 323 | AGGCUCGCGGCCACGCUAG | 807 |
| TRIM40 | AATTTCAGATCATCTTCTC | 324 | AAUUUCAGAUCAUCUUCUC | 808 |
| TRIM52 | TAGCCAGCGGCTGCATCTG | 325 | UAGCCAGCGGCUGCAUCUG | 809 |
| TSHZ2 | ACACACACAAGACAGGGCG | 326 | ACACACACAAGACAGGGCG | 810 |
| VAX1 | TGTCCCCAGCCTGGCGATC | 327 | UGUCCCCAGCCUGGCGAUC | 811 |
| VEGFA | CCGGGTAGCTCGGAGGTCG | 328 | CCGGGUAGCUCGGAGGUCG | 812 |
| VSX1 | ATAGCATGGGATCATGCTC | 329 | AUAGCAUGGGAUCAUGCUC | 813 |
| VSX1 | CAGCGTGATGGCCGAGTAC | 330 | CAGCGUGAUGGCCGAGUAC | 814 |
| WNT1 | GCTCGCGGTCCCGGCTGGT | 331 | GCUCGCGGUCCCGGCUGGU | 815 |
| WNT3A | GCTCACTCACCACCAGATC | 332 | GCUCACUCACCACCAGAUC | 816 |
| YBX1 | TCGAACTAGCGAGAATGGC | 333 | UCGAACUAGCGAGAAUGGC | 817 |
| YY1 | GCGGCTGCAGAGCGATCAT | 334 | GCGGCUGCAGAGCGAUCAU | 818 |
| YY2 | AGAGAAAGGCGCGAGACTG | 335 | AGAGAAAGGCGCGAGACUG | 819 |
| YY2 | AGGAAGGGGCGAGCTGCAG | 336 | AGGAAGGGGCGAGCUGCAG | 820 |
| ZBED5 | CAGCTCAGGGATATCGCCT | 337 | CAGCUCAGGGAUAUCGCCU | 821 |
| ZBED5 | ATCTCTATGGAGATGGCCT | 338 | AUCUCUAUGGAGAUGGCCU | 822 |
| ZBTB2 | GTGTGGAGGAGGCGCCTCT | 339 | GUGUGGAGGAGGCGCCUCU | 823 |
| ZBTB21 | GATGGAATCACAGCGGCAG | 340 | GAUGGAAUCACAGCGGCAG | 824 |
| ZBTB38 | CACGGGTCCGGAAGCACCA | 341 | CACGGGUCCGGAAGCACCA | 825 |
| ZBTB4 | CGCCTGCGCAGGCCCGCAA | 342 | CGCCUGCGCAGGCCCGCAA | 826 |
| ZBTB40 | CGCCGGAGACGCCAGAAGG | 343 | CGCCGGAGACGCCAGAAGG | 827 |
| ZBTB42 | GCCGGGAAGGGCGCTTCGT | 344 | GCCGGGAAGGGCGCUUCGU | 828 |
| ZBTB49 | TCTGTGCCGGGCATCACAG | 345 | UCUGUGCCGGGCAUCACAG | 829 |
| ZBTB7B | GCGGCCTTCTGACCAGGAC | 346 | GCGGCCUUCUGACCAGGAC | 830 |
| ZBTB7B | AGCAGGGCCCCAAGCCCCC | 347 | AGCAGGGCCCCAAGCCCCC | 831 |
| ZBTB7C | CGCCACGAGACTCTGACAG | 348 | CGCCACGAGACUCUGACAG | 832 |
| ZBTB8B | GTCGGTGCGCGGTGCTCCG | 349 | GUCGGUGCGCGGUGCUCCG | 833 |
| ZBTB9 | GTCGGCGGGAAGGACAATC | 350 | GUCGGCGGGAAGGACAAUC | 834 |
| ZC3H8 | ACCCGAGAGAGTGACAACC | 351 | ACCCGAGAGAGUGACAACC | 835 |
| ZEB2 | CCTCGCCAAGAGTGTCGGG | 352 | CCUCGCCAAGAGUGUCGGG | 836 |
| ZFHX2 | CTCTACCTAAAGCTGAACT | 353 | CUCUACCUAAAGCUGAACU | 837 |
| ZFHX3 | TGCCGCCGAGCAGCATGGT | 354 | UGCCGCCGAGCAGCAUGGU | 838 |
| ZFP28 | GCCTCGGGTGACATGCGGG | 355 | GCCUCGGGUGACAUGCGGG | 839 |
| ZFP41 | CCGGTGCCTAGGGCCGACG | 356 | CCGGUGCCUAGGGCCGACG | 840 |
| ZFP69B | CTGCAGCGGTGGGAAGGCG | 357 | CUGCAGCGGUGGGAAGGCG | 841 |
| ZFP90 | GCAAGGCGCGAAACCCACC | 358 | GCAAGGCGCGAAACCCACC | 842 |
| ZGLP1 | TAAAGGCCCCACCTAGCTC | 359 | UAAAGGCCCCACCUAGCUC | 843 |
| ZHX3 | GGAGCCGCGGACTGCTGAG | 360 | GGAGCCGCGGACUGCUGAG | 844 |
| ZIC5 | GCTACACCACCACCAACAG | 361 | GCUACACCACCACCAACAG | 845 |
| ZKSCAN1 | GAGGGCCTAAGTCCGTGTG | 362 | GAGGGCCUAAGUCCGUGUG | 846 |
| ZKSCAN1 | GGCCGAAGGGCACCGCACA | 363 | GGCCGAAGGGCACCGCACA | 847 |
| ZKSCAN2 | CAGGGCTCGCAGGGGGCAG | 364 | CAGGGCUCGCAGGGGGCAG | 848 |
| ZKSCAN7 | CCGCGTCTCGGCCCACTCG | 365 | CCGCGUCUCGGCCCACUCG | 849 |
| ZNF107 | AGCCACAGCCACTTCCGAT | 366 | AGCCACAGCCACUUCCGAU | 850 |
| ZNF121 | TCCCAGTCAGGAGCCAGGT | 367 | UCCCAGUCAGGAGCCAGGU | 851 |
| ZNF132 | AGCAAAATGAGGACCGCAA | 368 | AGCAAAAUGAGGACCGCAA | 852 |
| ZNF135 | CTTTGTCTCGCAGTCAGGA | 369 | CUUUGUCUCGCAGUCAGGA | 853 |
| ZNF135 | AGGGTGAGCTAGGCCGGCG | 370 | AGGGUGAGCUAGGCCGGCG | 854 |
| ZNF140 | CGTTGCCTACAGCCAACAC | 371 | CGUUGCCUACAGCCAACAC | 855 |
| ZNF141 | AGCTGTGGCCGAATCACCA | 372 | AGCUGUGGCCGAAUCACCA | 856 |
| ZNF222 | GGTTGCGAGCCCCAAGGAA | 373 | GGUUGCGAGCCCCAAGGAA | 857 |
| ZNF225 | CAACCTCACAGTAACGGAG | 374 | CAACCUCACAGUAACGGAG | 858 |
| ZNF229 | AGGCCATGGGAATTAGGAT | 375 | AGGCCAUGGGAAUUAGGAU | 859 |
| ZNF230 | TCGTTGCGACCCCAAGCGA | 376 | UCGUUGCGACCCCAAGCGA | 860 |
| ZNF248 | TGCAGGAGCCGTCTCCCTC | 377 | UGCAGGAGCCGUCUCCCUC | 861 |
| ZNF25 | ACCAGGCGGCTCCCACCCA | 378 | ACCAGGCGGCUCCCACCCA | 862 |
| ZNF26 | ACACCCGCTGGCCAGATTC | 379 | ACACCCGCUGGCCAGAUUC | 863 |
| ZNF267 | TACATCACCTCAAATAAAA | 380 | UACAUCACCUCAAAUAAAA | 864 |
| ZNF280C | TGGGGTTCGGATAAGGAGG | 381 | UGGGGUUCGGAUAAGGAGG | 865 |
| ZNF281 | GACCCGTAAGTATTGCCGG | 382 | GACCCGUAAGUAUUGCCGG | 866 |
| ZNF283 | ACCTTAAGGACACCGGAAA | 383 | ACCUUAAGGACACCGGAAA | 867 |
| ZNF286B | GTGCTGCTCTCATTCCGCC | 384 | GUGCUGCUCUCAUUCCGCC | 868 |
| ZNF304 | CAACCAGAATGCACGGACC | 385 | CAACCAGAAUGCACGGACC | 869 |
| ZNF317 | ATCGGGGGAGCGGAGGTGA | 386 | AUCGGGGGAGCGGAGGUGA | 870 |
| ZNF317 | GACACGAGGGGTCCCCAAC | 387 | GACACGAGGGGUCCCCAAC | 871 |
| ZNF318 | CACGGCGACAGCTCTGACC | 388 | CACGGCGACAGCUCUGACC | 872 |
| ZNF320 | AGCCGCCGAGAGCGACGGT | 389 | AGCCGCCGAGAGCGACGGU | 873 |
| ZNF33B | AGGAACTGGCGTAGCGTCC | 390 | AGGAACUGGCGUAGCGUCC | 874 |
| ZNF346 | CAGGCCGCGGACGGCGGAG | 391 | CAGGCCGCGGACGGCGGAG | 875 |
| ZNF358 | CGCTCCCGGGGAGCGAGAG | 392 | CGCUCCCGGGGAGCGAGAG | 876 |
| ZNF367 | TGTAACGCGGGAAAAGCCG | 393 | UGUAACGCGGGAAAAGCCG | 877 |
| ZNF382 | CACGGACGCAGCCACAGAA | 394 | CACGGACGCAGCCACAGAA | 878 |
| ZNF383 | CAAGGGTAGGGGAAGTGCG | 395 | CAAGGGUAGGGGAAGUGCG | 879 |
| ZNF385B | CGGCGCGCGAGAGTGGCGT | 396 | CGGCGCGCGAGAGUGGCGU | 880 |
| ZNF385B | GCCCGGCGCGGGCAAGAGT | 397 | GCCCGGCGCGGGCAAGAGU | 881 |
| ZNF391 | CCCGCCCGGGGTGTGTCGG | 398 | CCCGCCCGGGGUGUGUCGG | 882 |
| ZNF415 | AACGGATCGCGTTGGGTGA | 399 | AACGGAUCGCGUUGGGUGA | 883 |
| ZNF423 | CCTTGCCTGGGGAGGATGA | 400 | CCUUGCCUGGGGAGGAUGA | 884 |
| ZNF43 | CTCCGGCACGCGCAGATTG | 401 | CUCCGGCACGCGCAGAUUG | 885 |
| ZNF43 | CAGCTCTGCAGCCGCAACG | 402 | CAGCUCUGCAGCCGCAACG | 886 |
| ZNF432 | CAGGGCGTGGAAACGTGGT | 403 | CAGGGCGUGGAAACGUGGU | 887 |
| ZNF433 | CAGGCGGCGAGCTGAGGTT | 404 | CAGGCGGCGAGCUGAGGUU | 888 |
| ZNF436 | TCAGAAACCACAGGCTCAT | 405 | UCAGAAACCACAGGCUCAU | 889 |
| ZNF441 | AATCAGGCGCACTGACCGG | 406 | AAUCAGGCGCACUGACCGG | 890 |
| ZNF441 | CGTGCGGCCGAGGGAACCG | 407 | CGUGCGGCCGAGGGAACCG | 891 |
| ZNF443 | GGAGCTGTCGGTAGGACCT | 408 | GGAGCUGUCGGUAGGACCU | 892 |
| ZNF461 | AGGAATGGTCTCCGGGTAG | 409 | AGGAAUGGUCUCCGGGUAG | 893 |
| ZNF462 | TGCCGGGTCTCAGCAATGG | 410 | UGCCGGGUCUCAGCAAUGG | 894 |
| ZNF468 | AAACGTATACATTGCCCTA | 411 | AAACGUAUACAUUGCCCUA | 895 |
| ZNF473 | CTGCGAGGAGGCGCGTGTG | 412 | CUGCGAGGAGGCGCGUGUG | 896 |
| ZNF483 | CGGATGCTGATGCAGGTAC | 413 | CGGAUGCUGAUGCAGGUAC | 897 |
| ZNF486 | TCGCTGCATCTGGAGCTCT | 414 | UCGCUGCAUCUGGAGCUCU | 898 |
| ZNF491 | GACTGGATGCAGAACGCAA | 415 | GACUGGAUGCAGAACGCAA | 899 |
| ZNF507 | TGGAGCTCCGGATGAGGAG | 416 | UGGAGCUCCGGAUGAGGAG | 900 |
| ZNF514 | AGAGGCAGGCAGTACTTCA | 417 | AGAGGCAGGCAGUACUUCA | 901 |
| ZNF519 | CACAGAGCGACGGAGTGAG | 418 | CACAGAGCGACGGAGUGAG | 902 |
| ZNF519 | CAGCCAGAGCGCGGGGTTA | 419 | CAGCCAGAGCGCGGGGUUA | 903 |
| ZNF540 | ACGGGCCCTAGCGGCTTGG | 420 | ACGGGCCCUAGCGGCUUGG | 904 |
| ZNF543 | GCTGGACGCGCCTACCCAG | 421 | GCUGGACGCGCCUACCCAG | 905 |
| ZNF546 | GCAATGTAAAGGGCCCTTG | 422 | GCAAUGUAAAGGGCCCUUG | 906 |
| ZNF549 | GCCGGAAACGCCCAGCCCG | 423 | GCCGGAAACGCCCAGCCCG | 907 |
| ZNF555 | GCCAGGGACCGCTAGGGGC | 424 | GCCAGGGACCGCUAGGGGC | 908 |
| ZNF562 | CACCACAATAAAGGTTAAA | 425 | CACCACAAUAAAGGUUAAA | 909 |
| ZNF567 | CGGCCGGCAACCGAAGGTG | 426 | CGGCCGGCAACCGAAGGUG | 910 |
| ZNF569 | GTCTCGGTCCGTTACACCA | 427 | GUCUCGGUCCGUUACACCA | 911 |
| ZNF574 | ACTGAGGTAGTGACTGAGG | 428 | ACUGAGGUAGUGACUGAGG | 912 |
| ZNF577 | GCAGTGTGTGGGGTTCGCG | 429 | GCAGUGUGUGGGGUUCGCG | 913 |
| ZNF596 | CCGCAGGAAGGGAACTGCG | 430 | CCGCAGGAAGGGAACUGCG | 914 |
| ZNF610 | AAGCGCGGGGCAGGACGTT | 431 | AAGCGCGGGGCAGGACGUU | 915 |
| ZNF616 | CCCCTCCAGGCGTCGACAA | 432 | CCCCUCCAGGCGUCGACAA | 916 |
| ZNF621 | CACGGTCCGGGTGAAGGAG | 433 | CACGGUCCGGGUGAAGGAG | 917 |
| ZNF626 | TGGGAGAGACGCCACGCTG | 434 | UGGGAGAGACGCCACGCUG | 918 |
| ZNF627 | ACGCGAGCCCGGGTGGGGA | 435 | ACGCGAGCCCGGGUGGGGA | 919 |
| ZNF629 | CTTCTCAAGGGGTGATTCC | 436 | CUUCUCAAGGGGUGAUUCC | 920 |
| ZNF630 | CACTCACCCGGACAAGTCG | 437 | CACUCACCCGGACAAGUCG | 921 |
| ZNF630 | ATCCTACGAAAGCAGTGTG | 438 | AUCCUACGAAAGCAGUGUG | 922 |
| ZNF641 | CGGCGGAGCCAGCGACAGG | 439 | CGGCGGAGCCAGCGACAGG | 923 |
| ZNF645 | CACATTCTTGTTCACCAGC | 440 | CACAUUCUUGUUCACCAGC | 924 |
| ZNF658 | ACCAAAGAGGTCGTTGTGA | 441 | ACCAAAGAGGUCGUUGUGA | 925 |
| ZNF660 | GCTACGAGGAGTCAGAGAC | 442 | GCUACGAGGAGUCAGAGAC | 926 |
| ZNF662 | TGGAGTCGGGGTCTTACTC | 443 | UGGAGUCGGGGUCUUACUC | 927 |
| ZNF677 | GCGAGATCCGCTTCCGGGT | 444 | GCGAGAUCCGCUUCCGGGU | 928 |
| ZNF682 | GACTCCAGTCCGCAGACTC | 445 | GACUCCAGUCCGCAGACUC | 929 |
| ZNF697 | GCCCCAGGGGAGCGGACAA | 446 | GCCCCAGGGGAGCGGACAA | 930 |
| ZNF703 | TGCTAGCCGGGGCCAGCGG | 447 | UGCUAGCCGGGGCCAGCGG | 931 |
| ZNF705A | TGAGTATATTCAGGAGGAT | 448 | UGAGUAUAUUCAGGAGGAU | 932 |
| ZNF705B | TAGCCCCAGTTGGCCCTAC | 449 | UAGCCCCAGUUGGCCCUAC | 933 |
| ZNF705G | TTGGAACACCCAGGCAGGG | 450 | UUGGAACACCCAGGCAGGG | 934 |
| ZNF716 | GGACGCTTCCGTAAGGTTA | 451 | GGACGCUUCCGUAAGGUUA | 935 |
| ZNF729 | CGAGATGGGAAAGAACTCC | 452 | CGAGAUGGGAAAGAACUCC | 936 |
| ZNF750 | TGGGCTCCGAGGATTACTC | 453 | UGGGCUCCGAGGAUUACUC | 937 |
| ZNF75A | CTGGCTCTGTACCTGGACA | 454 | CUGGCUCUGUACCUGGACA | 938 |
| ZNF765 | ACTGGGAGGCGCTCAGGGA | 455 | ACUGGGAGGCGCUCAGGGA | 939 |
| ZNF771 | TCGGCGACCTGGAGCTCTG | 456 | UCGGCGACCUGGAGCUCUG | 940 |
| ZNF773 | GGAAGCTGGTTGTTCGCTG | 457 | GGAAGCUGGUUGUUCGCUG | 941 |
| ZNF773 | GCAAGCTGAGTTCTCTTGA | 458 | GCAAGCUGAGUUCUCUUGA | 942 |
| ZNF773 | TCGCTGCGGCGACCAGCTC | 459 | UCGCUGCGGCGACCAGCUC | 943 |
| ZNF774 | GGCACAGCCTCGGGGTTGC | 460 | GGCACAGCCUCGGGGUUGC | 944 |
| ZNF778 | GACAGCCCGAGGACACGCG | 461 | GACAGCCCGAGGACACGCG | 945 |
| ZNF778 | TCCCGGACCAGCTTCCCCG | 462 | UCCCGGACCAGCUUCCCCG | 946 |
| ZNF784 | GCTCCTGGGATCGCGACTC | 463 | GCUCCUGGGAUCGCGACUC | 947 |
| ZNF789 | GGAACAGACACAACCACTC | 464 | GGAACAGACACAACCACUC | 948 |
| ZNF804B | CGAGGTGGCTGCTCAACCG | 465 | CGAGGUGGCUGCUCAACCG | 949 |
| ZNF816 | GAGCAGATTCGCACAAACC | 466 | GAGCAGAUUCGCACAAACC | 950 |
| ZNF823 | TCCCCTGGGCCGCAAGATG | 467 | UCCCCUGGGCCGCAAGAUG | 951 |
| ZNF83 | TGAGGACGATAGAACGATT | 468 | UGAGGACGAUAGAACGAUU | 952 |
| ZNF83 | CTTCATGCTACACAGTCCA | 469 | CUUCAUGCUACACAGUCCA | 953 |
| ZNF831 | CCCGCGCCCCGCTAGTGAC | 470 | CCCGCGCCCCGCUAGUGAC | 954 |
| ZNF846 | GACGCTCCGGACTTCTGCT | 471 | GACGCUCCGGACUUCUGCU | 955 |
| ZNF852 | CGTTTGGATGATTGTCTCT | 472 | CGUUUGGAUGAUUGUCUCU | 956 |
| ZNF879 | ACACCGCACAAGAGGCGAG | 473 | ACACCGCACAAGAGGCGAG | 957 |
| ZNF91 | CGCTGCCGCCGGAGTTTCC | 474 | CGCUGCCGCCGGAGUUUCC | 958 |
| ZNF93 | AACAGGGCGGCTTCTGGTT | 475 | AACAGGGCGGCUUCUGGUU | 959 |
| ZNF99 | CACAGGGCCACAGAGGCTA | 476 | CACAGGGCCACAGAGGCUA | 960 |
| ZNF99 | TAGTCACAGTGCAGGAAGG | 477 | UAGUCACAGUGCAGGAAGG | 961 |
| ZSCAN16 | CAGCCTTCCGGGAGAGGAT | 478 | CAGCCUUCCGGGAGAGGAU | 962 |
| ZSCAN2 | CCTCTCCGGCTCACCTCTC | 479 | CCUCUCCGGCUCACCUCUC | 963 |
| ZSCAN21 | TCAGAGCCGCTCCGGGTAC | 480 | UCAGAGCCGCUCCGGGUAC | 964 |
| ZSCAN5A | TAACTTTCTCATCAAGCTT | 481 | UAACUUUCUCAUCAAGCUU | 965 |
| ZSCAN5A | TCCGCGTCGAGGCCCTACG | 482 | UCCGCGUCGAGGCCCUACG | 966 |
| ZSCAN5B | ATTCATGTGCCAAGTCTCA | 483 | AUUCAUGUGCCAAGUCUCA | 967 |
| ZSCAN5B | GGTGAGTGTCCAGCGGCGA | 484 | GGUGAGUGUCCAGCGGCGA | 968 |

TABLE 2
Genes and gene-targeting gRNAs

| | | SEQ |
|---|---|---|
| Gene | Gene-targeting gRNA sequence | ID |
| BMP4 | GACAGCCGGCGAGCAGGGGGUUUAAGAGCUAUGCUGGAAACAGCAUAGCAAGU | 969 |
| | UUAAAUAAGGCUAGUCCGUUAUCAACUUGAAAAAGUGGCACCGAGUCGGUGC | |
| E2F7 | UUAGCGGGGACUACGAUCCGUUUAAGAGCUAUGCUGGAAACAGCAUAGCAAGU | 970 |
| | UUAAAUAAGGCUAGUCCGUUAUCAACUUGAAAAAGUGGCACCGAGUCGGUGC | |
| ESRRG | UGGAGCCCGCCGCCUCCAGGUUUAAGAGCUAUGCUGGAAACAGCAUAGCAAGU | 971 |
| | UUAAAUAAGGCUAGUCCGUUAUCAACUUGAAAAAGUGGCACCGAGUCGGUGC | |
| LYL1 | GUUUCCUCCCUCUCACCCCGUUUAAGAGCUAUGCUGGAAACAGCAUAGCAAGU | 972 |
| | UUAAAUAAGGCUAGUCCGUUAUCAACUUGAAAAAGUGGCACCGAGUCGGUGC | |
| STAT5A | CCGCGGUCCAGGGAUAGGUGUUUAAGAGCUAUGCUGGAAACAGCAUAGCAAGU | 973 |
| | UUAAAUAAGGCUAGUCCGUUAUCAACUUGAAAAAGUGGCACCGAGUCGGUGC | |
| THAP10 | CUUCCGGUGACCAGAGGUAGUUUAAGAGCUAUGCUGGAAACAGCAUAGCAAGU | 974 |
| | UUAAAUAAGGCUAGUCCGUUAUCAACUUGAAAAAGUGGCACCGAGUCGGUGC | |
| ZNF362 | GGGUAGGAAGUGUCUCCCGGUUUAAGAGCUAUGCUGGAAACAGCAUAGCAAGU | 975 |
| | UUAAAUAAGGCUAGUCCGUUAUCAACUUGAAAAAGUGGCACCGAGUCGGUGC | |
| ZSCAN1 | CCGCGCGCGGGCUUCGCUCGUUUAAGAGCUAUGCUGGAAACAGCAUAGCAAGU | 976 |
| | UUAAAUAAGGCUAGUCCGUUAUCAACUUGAAAAAGUGGCACCGAGUCGGUGC | |
| ANHX | CGGAAGGUGAGGGGCGCUAGUUUAAGAGCUAUGCUGGAAACAGCAUAGCAAGU | 977 |
| | UUAAAUAAGGCUAGUCCGUUAUCAACUUGAAAAAGUGGCACCGAGUCGGUGC | |
| CPEB1 | CAACAUCGUCUUCCAUGUCGUUUAAGAGCUAUGCUGGAAACAGCAUAGCAAGU | 978 |
| | UUAAAUAAGGCUAGUCCGUUAUCAACUUGAAAAAGUGGCACCGAGUCGGUGC | |
| CSRNP1 | UCUGCGCGUCCGGCAGCGGGUUUAAGAGCUAUGCUGGAAACAGCAUAGCAAGU | 979 |
| | UUAAAUAAGGCUAGUCCGUUAUCAACUUGAAAAAGUGGCACCGAGUCGGUGC | |
| EN2 | CUCCGUGUGCGCCGCGGGAGUUUAAGAGCUAUGCUGGAAACAGCAUAGCAAGU | 980 |
| | UUAAAUAAGGCUAGUCCGUUAUCAACUUGAAAAAGUGGCACCGAGUCGGUGC | |
| EPAS1 | CGCCCCAGCGCUCCUGAGGGUUUAAGAGCUAUGCUGGAAACAGCAUAGCAAGU | 981 |
| | UUAAAUAAGGCUAGUCCGUUAUCAACUUGAAAAAGUGGCACCGAGUCGGUGC | |
| IRX3 | AAGCAGCGGAAGCGAUCCUGUUUAAGAGCUAUGCUGGAAACAGCAUAGCAAGU | 982 |
| | UUAAAUAAGGCUAGUCCGUUAUCAACUUGAAAAAGUGGCACCGAGUCGGUGC | |
| LHX8 | CGAGCUACCAGCGCUCGGGGUUUAAGAGCUAUGCUGGAAACAGCAUAGCAAGU | 983 |
| | UUAAAUAAGGCUAGUCCGUUAUCAACUUGAAAAAGUGGCACCGAGUCGGUGC | |
| NR5A2 | AGCAUGACAAGGCGACCGCGUUUAAGAGCUAUGCUGGAAACAGCAUAGCAAGU | 984 |
| | UUAAAUAAGGCUAGUCCGUUAUCAACUUGAAAAAGUGGCACCGAGUCGGUGC | |
| PRDM16 | ACCAUGCGAUCCAAGGCGAGUUUAAGAGCUAUGCUGGAAACAGCAUAGCAAGU | 985 |
| | UUAAAUAAGGCUAGUCCGUUAUCAACUUGAAAAAGUGGCACCGAGUCGGUGC | |
| RAX2 | CCGGAGCCGAGCCAGGUCGGUUUAAGAGCUAUGCUGGAAACAGCAUAGCAAGU | 986 |
| | UUAAAUAAGGCUAGUCCGUUAUCAACUUGAAAAAGUGGCACCGAGUCGGUGC | |
| SCML4 | UGUGAGCUACUAACACGGGGUUUAAGAGCUAUGCUGGAAACAGCAUAGCAAGU | 987 |
| | UUAAAUAAGGCUAGUCCGUUAUCAACUUGAAAAAGUGGCACCGAGUCGGUGC | |
| SMAD1 | GCUCCUCCGAGCAGACGGGGUUUAAGAGCUAUGCUGGAAACAGCAUAGCAAGU | 988 |
| | UUAAAUAAGGCUAGUCCGUUAUCAACUUGAAAAAGUGGCACCGAGUCGGUGC | |
| SOX6 | UCUAGCCAGCCCCUAAGUCGUUUAAGAGCUAUGCUGGAAACAGCAUAGCAAGU | 989 |
| | UUAAAUAAGGCUAGUCCGUUAUCAACUUGAAAAAGUGGCACCGAGUCGGUGC | |
| SUV39H1 | UCUUCUCGCGAGGCCGGCUGUUUAAGAGCUAUGCUGGAAACAGCAUAGCAAGU | 990 |
| | UUAAAUAAGGCUAGUCCGUUAUCAACUUGAAAAAGUGGCACCGAGUCGGUGC | |
| TFDP1 | UCCCGGCGCCACUCGGCCCGUUUAAGAGCUAUGCUGGAAACAGCAUAGCAAGU | 991 |
| | UUAAAUAAGGCUAGUCCGUUAUCAACUUGAAAAAGUGGCACCGAGUCGGUGC | |
| ZNF287 | CAGAGGCGCCGGGGUUUCUGUUUAAGAGCUAUGCUGGAAACAGCAUAGCAAGU | 992 |
| | UUAAAUAAGGCUAGUCCGUUAUCAACUUGAAAAAGUGGCACCGAGUCGGUGC | |
| ZNF438 | GUCACGGGCCCAGCAGUCGGUUUAAGAGCUAUGCUGGAAACAGCAUAGCAAGU | 993 |
| | UUAAAUAAGGCUAGUCCGUUAUCAACUUGAAAAAGUGGCACCGAGUCGGUGC | |
| ZNF681 | AGGAGAAAGGACGCCCGGGGUUUAAGAGCUAUGCUGGAAACAGCAUAGCAAGU | 994 |
| | UUAAAUAAGGCUAGUCCGUUAUCAACUUGAAAAAGUGGCACCGAGUCGGUGC | |
| ZNF853 | CCUCUGCGCUAGGGAGGUGGUUUAAGAGCUAUGCUGGAAACAGCAUAGCAAGU | 995 |
| | UUAAAUAAGGCUAGUCCGUUAUCAACUUGAAAAAGUGGCACCGAGUCGGUGC | |
| BMP4 | GAGGAAGGAAGAUGCGAGAGUUUAAGAGCUAUGCUGGAAACAGCAUAGCAAGU | 996 |
| | UUAAAUAAGGCUAGUCCGUUAUCAACUUGAAAAAGUGGCACCGAGUCGGUGC | |
| CARF | UCCCAACCAGAGGCUCACUGUUUAAGAGCUAUGCUGGAAACAGCAUAGCAAGU | 997 |
| | UUAAAUAAGGCUAGUCCGUUAUCAACUUGAAAAAGUGGCACCGAGUCGGUGC | |
| ESRRG | UCUUCAGCUAUACCAAGAGGUUUAAGAGCUAUGCUGGAAACAGCAUAGCAAGU | 998 |
| | UUAAAUAAGGCUAGUCCGUUAUCAACUUGAAAAAGUGGCACCGAGUCGGUGC | |
| ESRRG | UGUGUUGUAGUGAUCAUGUGUUUAAGAGCUAUGCUGGAAACAGCAUAGCAAGU | 999 |
| | UUAAAUAAGGCUAGUCCGUUAUCAACUUGAAAAAGUGGCACCGAGUCGGUGC | |
| FOXR2 | AUCUAGGGAGCUUAUCAGUGUUUAAGAGCUAUGCUGGAAACAGCAUAGCAAGU | 1000 |
| | UUAAAUAAGGCUAGUCCGUUAUCAACUUGAAAAAGUGGCACCGAGUCGGUGC | |
| HOXA7 | GCCGUAGCCGGACGCAAAGGUUUAAGAGCUAUGCUGGAAACAGCAUAGCAAGU | 1001 |
| | UUAAAUAAGGCUAGUCCGUUAUCAACUUGAAAAAGUGGCACCGAGUCGGUGC | |
| IRF9 | GGUAAGAUCAGCCAAGGAUGUUUAAGAGCUAUGCUGGAAACAGCAUAGCAAGU | 1002 |
| | UUAAAUAAGGCUAGUCCGUUAUCAACUUGAAAAAGUGGCACCGAGUCGGUGC | |
| KAT5 | GAAGUGACGUCUCCCAGAGGUUUAAGAGCUAUGCUGGAAACAGCAUAGCAAGU | 1003 |
| | UUAAAUAAGGCUAGUCCGUUAUCAACUUGAAAAAGUGGCACCGAGUCGGUGC | |
| KLF5 | AGAGCCUGAGAGCACGGUGGUUUAAGAGCUAUGCUGGAAACAGCAUAGCAAGU | 1004 |
| | UUAAAUAAGGCUAGUCCGUUAUCAACUUGAAAAAGUGGCACCGAGUCGGUGC | |
| NEUROD1 | CAGGACCUACUAACAACAAGUUUAAGAGCUAUGCUGGAAACAGCAUAGCAAGU | 1005 |
| | UUAAAUAAGGCUAGUCCGUUAUCAACUUGAAAAAGUGGCACCGAGUCGGUGC | |
| PAX6 | AUGUUGCGGAGUGAUUAGUGUUUAAGAGCUAUGCUGGAAACAGCAUAGCAAGU | 1006 |
| | UUAAAUAAGGCUAGUCCGUUAUCAACUUGAAAAAGUGGCACCGAGUCGGUGC | |
| PIN1 | UGCGCUUCUCCCAGCCGGGGUUUAAGAGCUAUGCUGGAAACAGCAUAGCAAGU | 1007 |
| | UUAAAUAAGGCUAGUCCGUUAUCAACUUGAAAAAGUGGCACCGAGUCGGUGC | |
| PURG | GGUGUCCGAAGUCAGGCGGGUUUAAGAGCUAUGCUGGAAACAGCAUAGCAAGU | 1008 |
| | UUAAAUAAGGCUAGUCCGUUAUCAACUUGAAAAAGUGGCACCGAGUCGGUGC | |
| PURG | UGGUCGUGAAGGGCAUCGGGUUUAAGAGCUAUGCUGGAAACAGCAUAGCAAGU | 1009 |
| | UUAAAUAAGGCUAGUCCGUUAUCAACUUGAAAAAGUGGCACCGAGUCGGUGC | |
| RARA | CAUAGCGAGUCACGUGCGGGUUUAAGAGCUAUGCUGGAAACAGCAUAGCAAGU | 1010 |
| | UUAAAUAAGGCUAGUCCGUUAUCAACUUGAAAAAGUGGCACCGAGUCGGUGC | |
| SNAPC5 | UGCCGGGCCGACAGCAGCCGUUUAAGAGCUAUGCUGGAAACAGCAUAGCAAGU | 1011 |
| | UUAAAUAAGGCUAGUCCGUUAUCAACUUGAAAAAGUGGCACCGAGUCGGUGC | |
| STAT5A | CCUCAUAAGUAACUAGGCUGUUUAAGAGCUAUGCUGGAAACAGCAUAGCAAGU | 1012 |
| | UUAAAUAAGGCUAGUCCGUUAUCAACUUGAAAAAGUGGCACCGAGUCGGUGC | |
| TBX22 | UUAGUGGGACAUCAGUACAGUUUAAGAGCUAUGCUGGAAACAGCAUAGCAAGU | 1013 |
| | UUAAAUAAGGCUAGUCCGUUAUCAACUUGAAAAAGUGGCACCGAGUCGGUGC | |
| WT1 | CAAGGCAGCGCCCACACCCGUUUAAGAGCUAUGCUGGAAACAGCAUAGCAAGU | 1014 |
| | UUAAAUAAGGCUAGUCCGUUAUCAACUUGAAAAAGUGGCACCGAGUCGGUGC | |
| ZNF138 | UGCGUCCUCUUACUCCUAGGUUUAAGAGCUAUGCUGGAAACAGCAUAGCAAGU | 1015 |
| | UUAAAUAAGGCUAGUCCGUUAUCAACUUGAAAAAGUGGCACCGAGUCGGUGC | |
| ZNF143 | UGUCCUGGUGCAUGGUGGUGUUUAAGAGCUAUGCUGGAAACAGCAUAGCAAGU | 1016 |
| | UUAAAUAAGGCUAGUCCGUUAUCAACUUGAAAAAGUGGCACCGAGUCGGUGC | |
| ZNF205 | CUCCACAGCCUGCACGGGGGUUUAAGAGCUAUGCUGGAAACAGCAUAGCAAGU | 1017 |
| | UUAAAUAAGGCUAGUCCGUUAUCAACUUGAAAAAGUGGCACCGAGUCGGUGC | |
| ZNF235 | AGAGGGCUCGGAGAAGUCUGUUUAAGAGCUAUGCUGGAAACAGCAUAGCAAGU | 1018 |
| | UUAAAUAAGGCUAGUCCGUUAUCAACUUGAAAAAGUGGCACCGAGUCGGUGC | |
| ZNF526 | GAUUGGUCGCCACGGGUAAGUUUAAGAGCUAUGCUGGAAACAGCAUAGCAAGU | 1019 |
| | UUAAAUAAGGCUAGUCCGUUAUCAACUUGAAAAAGUGGCACCGAGUCGGUGC | |
| ZNF548 | AGCACUGGGAGGACCGGUCGUUUAAGAGCUAUGCUGGAAACAGCAUAGCAAGU | 1020 |
| | UUAAAUAAGGCUAGUCCGUUAUCAACUUGAAAAAGUGGCACCGAGUCGGUGC | |
| ZNF559 | CUGUCCUCAGGGGUCGAGGGUUUAAGAGCUAUGCUGGAAACAGCAUAGCAAGU | 1021 |
| | UUAAAUAAGGCUAGUCCGUUAUCAACUUGAAAAAGUGGCACCGAGUCGGUGC | |
| ZNF611 | UGCGCUAACUAGGUUCCCAGUUUAAGAGCUAUGCUGGAAACAGCAUAGCAAGU | 1022 |
| | UUAAAUAAGGCUAGUCCGUUAUCAACUUGAAAAAGUGGCACCGAGUCGGUGC | |
| ZNF655 | CCGCGAGGUGAAUGAACCAGUUUAAGAGCUAUGCUGGAAACAGCAUAGCAAGU | 1023 |
| | UUAAAUAAGGCUAGUCCGUUAUCAACUUGAAAAAGUGGCACCGAGUCGGUGC | |
| ZNF672 | CACCGGUUGCUGGGAAGACGUUUAAGAGCUAUGCUGGAAACAGCAUAGCAAGU | 1024 |
| | UUAAAUAAGGCUAGUCCGUUAUCAACUUGAAAAAGUGGCACCGAGUCGGUGC | |
| ZNF699 | CGGACAAGGAGUGGCGGGGGUUUAAGAGCUAUGCUGGAAACAGCAUAGCAAGU | 1025 |
| | UUAAAUAAGGCUAGUCCGUUAUCAACUUGAAAAAGUGGCACCGAGUCGGUGC | |
| ZNF706 | CACUCUGGCAGCUGACCGGGUUUAAGAGCUAUGCUGGAAACAGCAUAGCAAGU | 1026 |
| | UUAAAUAAGGCUAGUCCGUUAUCAACUUGAAAAAGUGGCACCGAGUCGGUGC | |
| ZNF714 | CUGACCUGGAGUCCUCUCAGUUUAAGAGCUAUGCUGGAAACAGCAUAGCAAGU | 1027 |
| | UUAAAUAAGGCUAGUCCGUUAUCAACUUGAAAAAGUGGCACCGAGUCGGUGC | |
| ZNF772 | UAGUCCACAGGCCUGAUGGGUUUAAGAGCUAUGCUGGAAACAGCAUAGCAAGU | 1028 |
| | UUAAAUAAGGCUAGUCCGUUAUCAACUUGAAAAAGUGGCACCGAGUCGGUGC | |
| ZNF782 | GGGUCGGCUCGGAAAGUAGGUUUAAGAGCUAUGCUGGAAACAGCAUAGCAAGU | 1029 |
| | UUAAAUAAGGCUAGUCCGUUAUCAACUUGAAAAAGUGGCACCGAGUCGGUGC | |
| ZSCAN1 | UCGCCGUAGGGGAGGGAAGGUUUAAGAGCUAUGCUGGAAACAGCAUAGCAAGU | 1030 |
| | UUAAAUAAGGCUAGUCCGUUAUCAACUUGAAAAAGUGGCACCGAGUCGGUGC | |
| ZSCAN26 | UCCUUCUGCGAUGCCUAAGGUUUAAGAGCUAUGCUGGAAACAGCAUAGCAAGU | 1031 |
| | UUAAAUAAGGCUAGUCCGUUAUCAACUUGAAAAAGUGGCACCGAGUCGGUGC | |
| ADNP | UGUCUGCUGAGGGGAGACGGUUUAAGAGCUAUGCUGGAAACAGCAUAGCAAGU | 1032 |
| | UUAAAUAAGGCUAGUCCGUUAUCAACUUGAAAAAGUGGCACCGAGUCGGUGC | |
| AHRR | GCCAGGGCGCGCUGCCCCGGUUUAAGAGCUAUGCUGGAAACAGCAUAGCAAGU | 1033 |
| | UUAAAUAAGGCUAGUCCGUUAUCAACUUGAAAAAGUGGCACCGAGUCGGUGC | |
| AKNA | CCAGGAAACCACCCGCGCUGUUUAAGAGCUAUGCUGGAAACAGCAUAGCAAGU | 1034 |
| | UUAAAUAAGGCUAGUCCGUUAUCAACUUGAAAAAGUGGCACCGAGUCGGUGC | |
| ALX3 | CCUGCACCCGGCCCCUAUGGUUUAAGAGCUAUGCUGGAAACAGCAUAGCAAGU | 1035 |
| | UUAAAUAAGGCUAGUCCGUUAUCAACUUGAAAAAGUGGCACCGAGUCGGUGC | |
| ALX4 | UGCGACACCGGGCUGUAGUGUUUAAGAGCUAUGCUGGAAACAGCAUAGCAAGU | 1036 |
| | UUAAAUAAGGCUAGUCCGUUAUCAACUUGAAAAAGUGGCACCGAGUCGGUGC | |
| ANHX | AAGCGGGUCCCGGAGGGUGGUUUAAGAGCUAUGCUGGAAACAGCAUAGCAAGU | 1037 |
| | UUAAAUAAGGCUAGUCCGUUAUCAACUUGAAAAAGUGGCACCGAGUCGGUGC | |
| AR | GCUUGCUGGGAGAGCGGGAGUUUAAGAGCUAUGCUGGAAACAGCAUAGCAAGU | 1038 |
| | UUAAAUAAGGCUAGUCCGUUAUCAACUUGAAAAAGUGGCACCGAGUCGGUGC | |
| ARHGAP35 | CAGUGUGGUGGGAUUAUCUGUUUAAGAGCUAUGCUGGAAACAGCAUAGCAAGU | 1039 |
| | UUAAAUAAGGCUAGUCCGUUAUCAACUUGAAAAAGUGGCACCGAGUCGGUGC | |
| ARID3C | AGAGGUAUCAGGCAGAGACGUUUAAGAGCUAUGCUGGAAACAGCAUAGCAAGU | 1040 |
| | UUAAAUAAGGCUAGUCCGUUAUCAACUUGAAAAAGUGGCACCGAGUCGGUGC | |
| ARID5B | AGAAAGAGGAGCAGCGCCCGUUUAAGAGCUAUGCUGGAAACAGCAUAGCAAGU | 1041 |
| | UUAAAUAAGGCUAGUCCGUUAUCAACUUGAAAAAGUGGCACCGAGUCGGUGC | |
| ASCL5 | UGGCUCCCGGUGCUGUGGCGUUUAAGAGCUAUGCUGGAAACAGCAUAGCAAGU | 1042 |
| | UUAAAUAAGGCUAGUCCGUUAUCAACUUGAAAAAGUGGCACCGAGUCGGUGC | |
| ATF6B | GGCCUUGGGAACCGUCUCCGUUUAAGAGCUAUGCUGGAAACAGCAUAGCAAGU | 1043 |
| | UUAAAUAAGGCUAGUCCGUUAUCAACUUGAAAAAGUGGCACCGAGUCGGUGC | |
| ATOH7 | CUUCCUGCAAAGGAGUCUCGUUUAAGAGCUAUGCUGGAAACAGCAUAGCAAGU | 1044 |
| | UUAAAUAAGGCUAGUCCGUUAUCAACUUGAAAAAGUGGCACCGAGUCGGUGC | |
| BARHL1 | UCUAAUGCGCAGAGGAGGUGUUUAAGAGCUAUGCUGGAAACAGCAUAGCAAGU | 1045 |
| | UUAAAUAAGGCUAGUCCGUUAUCAACUUGAAAAAGUGGCACCGAGUCGGUGC | |
| BARHL2 | UUUCUUCGCUGGUUCGGGGGUUUAAGAGCUAUGCUGGAAACAGCAUAGCAAGU | 1046 |
| | UUAAAUAAGGCUAGUCCGUUAUCAACUUGAAAAAGUGGCACCGAGUCGGUGC | |
| BATF | CAGAGUGAGGAGGACGCAGGUUUAAGAGCUAUGCUGGAAACAGCAUAGCAAGU | 1047 |
| | UUAAAUAAGGCUAGUCCGUUAUCAACUUGAAAAAGUGGCACCGAGUCGGUGC | |
| BBX | AGCCCUCAGCGGCCAGUCAGUUUAAGAGCUAUGCUGGAAACAGCAUAGCAAGU | 1048 |
| | UUAAAUAAGGCUAGUCCGUUAUCAACUUGAAAAAGUGGCACCGAGUCGGUGC | |
| BHLHE40 | UCCGACUCAGCGCACAGACGUUUAAGAGCUAUGCUGGAAACAGCAUAGCAAGU | 1049 |
| | UUAAAUAAGGCUAGUCCGUUAUCAACUUGAAAAAGUGGCACCGAGUCGGUGC | |
| BNC2 | AGAGGAGACCAAGAGGCGGGUUUAAGAGCUAUGCUGGAAACAGCAUAGCAAGU | 1050 |
| | UUAAAUAAGGCUAGUCCGUUAUCAACUUGAAAAAGUGGCACCGAGUCGGUGC | |
| BRD4 | CAGUGGCAACACCCACAAGGUUUAAGAGCUAUGCUGGAAACAGCAUAGCAAGU | 1051 |
| | UUAAAUAAGGCUAGUCCGUUAUCAACUUGAAAAAGUGGCACCGAGUCGGUGC | |
| BRD9 | CCAGCGAGCUCGGCAACCUGUUUAAGAGCUAUGCUGGAAACAGCAUAGCAAGU | 1052 |
| | UUAAAUAAGGCUAGUCCGUUAUCAACUUGAAAAAGUGGCACCGAGUCGGUGC | |
| BSX | GACAAGGGCCGGGACGAAGGUUUAAGAGCUAUGCUGGAAACAGCAUAGCAAGU | 1053 |
| | UUAAAUAAGGCUAGUCCGUUAUCAACUUGAAAAAGUGGCACCGAGUCGGUGC | |
| CCDC17 | UGGGUGGCUAACAGAGCUGGUUUAAGAGCUAUGCUGGAAACAGCAUAGCAAGU | 1054 |
| | UUAAAUAAGGCUAGUCCGUUAUCAACUUGAAAAAGUGGCACCGAGUCGGUGC | |
| CDX1 | CGGUUGCUCGUCGUCGGGGGUUUAAGAGCUAUGCUGGAAACAGCAUAGCAAGU | 1055 |
| | UUAAAUAAGGCUAGUCCGUUAUCAACUUGAAAAAGUGGCACCGAGUCGGUGC | |
| CDX2 | CCUUCCCACUAGGCUGCAGGUUUAAGAGCUAUGCUGGAAACAGCAUAGCAAGU | 1056 |
| | UUAAAUAAGGCUAGUCCGUUAUCAACUUGAAAAAGUGGCACCGAGUCGGUGC | |
| CDX4 | GUUUCUUACGAGGGUAUCCGUUUAAGAGCUAUGCUGGAAACAGCAUAGCAAGU | 1057 |
| | UUAAAUAAGGCUAGUCCGUUAUCAACUUGAAAAAGUGGCACCGAGUCGGUGC | |
| CEBPB | GUGGCCGCUAUUAGUGAGGGUUUAAGAGCUAUGCUGGAAACAGCAUAGCAAGU | 1058 |
| | UUAAAUAAGGCUAGUCCGUUAUCAACUUGAAAAAGUGGCACCGAGUCGGUGC | |
| CENPB | CGGGCCGGGGGCACCUCCGGUUUAAGAGCUAUGCUGGAAACAGCAUAGCAAGU | 1059 |
| | UUAAAUAAGGCUAGUCCGUUAUCAACUUGAAAAAGUGGCACCGAGUCGGUGC | |
| CLOCK | CGCCGCCAAGGAAGCCAACGUUUAAGAGCUAUGCUGGAAACAGCAUAGCAAGU | 1060 |
| | UUAAAUAAGGCUAGUCCGUUAUCAACUUGAAAAAGUGGCACCGAGUCGGUGC | |
| CREB3 | UGGGAGGCGGGUCCGGAGAGUUUAAGAGCUAUGCUGGAAACAGCAUAGCAAGU | 1061 |
| | UUAAAUAAGGCUAGUCCGUUAUCAACUUGAAAAAGUGGCACCGAGUCGGUGC | |
| CREB3L4 | AAAGCGAGGGCUACAGAACGUUUAAGAGCUAUGCUGGAAACAGCAUAGCAAGU | 1062 |
| | UUAAAUAAGGCUAGUCCGUUAUCAACUUGAAAAAGUGGCACCGAGUCGGUGC | |
| CSRNP3 | CACGGCAUCAGCCUCACUGGUUUAAGAGCUAUGCUGGAAACAGCAUAGCAAGU | 1063 |
| | UUAAAUAAGGCUAGUCCGUUAUCAACUUGAAAAAGUGGCACCGAGUCGGUGC | |
| CTCF | CGCGGAGCUGCUUCUUUGGGUUUAAGAGCUAUGCUGGAAACAGCAUAGCAAGU | 1064 |
| | UUAAAUAAGGCUAGUCCGUUAUCAACUUGAAAAAGUGGCACCGAGUCGGUGC | |
| CUX1 | UGAGCGGCUGAUAGAGAGGGUUUAAGAGCUAUGCUGGAAACAGCAUAGCAAGU | 1065 |
| | UUAAAUAAGGCUAGUCCGUUAUCAACUUGAAAAAGUGGCACCGAGUCGGUGC | |
| CUX2 | GCGCGCCCUGGGCGCAUUGGUUUAAGAGCUAUGCUGGAAACAGCAUAGCAAGU | 1066 |
| | UUAAAUAAGGCUAGUCCGUUAUCAACUUGAAAAAGUGGCACCGAGUCGGUGC | |
| DACH2 | GGCCCGGAAUAAGCCCCCCGUUUAAGAGCUAUGCUGGAAACAGCAUAGCAAGU | 1067 |
| | UUAAAUAAGGCUAGUCCGUUAUCAACUUGAAAAAGUGGCACCGAGUCGGUGC | |
| DLX1 | CUCCCCAGGAACCAACCAGGUUUAAGAGCUAUGCUGGAAACAGCAUAGCAAGU | 1068 |
| | UUAAAUAAGGCUAGUCCGUUAUCAACUUGAAAAAGUGGCACCGAGUCGGUGC | |
| DLX4 | AAGCGGAAGCCAGCACGCAGUUUAAGAGCUAUGCUGGAAACAGCAUAGCAAGU | 1069 |
| | UUAAAUAAGGCUAGUCCGUUAUCAACUUGAAAAAGUGGCACCGAGUCGGUGC | |
| DLX5 | GCCGCGGCGAGGAGGAGACGUUUAAGAGCUAUGCUGGAAACAGCAUAGCAAGU | 1070 |
| | UUAAAUAAGGCUAGUCCGUUAUCAACUUGAAAAAGUGGCACCGAGUCGGUGC | |
| DLX6 | GAGUGGCUCAUGUAGGGGUGUUUAAGAGCUAUGCUGGAAACAGCAUAGCAAGU | 1071 |
| | UUAAAUAAGGCUAGUCCGUUAUCAACUUGAAAAAGUGGCACCGAGUCGGUGC | |
| DMRTB1 | AGGCUGGGCAUCGCCACGGGUUUAAGAGCUAUGCUGGAAACAGCAUAGCAAGU | 1072 |
| | UUAAAUAAGGCUAGUCCGUUAUCAACUUGAAAAAGUGGCACCGAGUCGGUGC | |
| DNMT3B | GACUCGCCCCCAAUCCUGGGUUUAAGAGCUAUGCUGGAAACAGCAUAGCAAGU | 1073 |
| | UUAAAUAAGGCUAGUCCGUUAUCAACUUGAAAAAGUGGCACCGAGUCGGUGC | |
| DOT1L | GCUUCACGCCGGCCCAAGAGUUUAAGAGCUAUGCUGGAAACAGCAUAGCAAGU | 1074 |
| | UUAAAUAAGGCUAGUCCGUUAUCAACUUGAAAAAGUGGCACCGAGUCGGUGC | |
| DPF1 | CUACGAUUUCAUUCAUUCUGUUUAAGAGCUAUGCUGGAAACAGCAUAGCAAGU | 1075 |
| | UUAAAUAAGGCUAGUCCGUUAUCAACUUGAAAAAGUGGCACCGAGUCGGUGC | |
| DR1 | GUAGCCCGAACGCAGAUCGGUUUAAGAGCUAUGCUGGAAACAGCAUAGCAAGU | 1076 |
| | UUAAAUAAGGCUAGUCCGUUAUCAACUUGAAAAAGUGGCACCGAGUCGGUGC | |
| E2F2 | GCGAUGCGCUGGGAUGGGGGUUUAAGAGCUAUGCUGGAAACAGCAUAGCAAGU | 1077 |
| | UUAAAUAAGGCUAGUCCGUUAUCAACUUGAAAAAGUGGCACCGAGUCGGUGC | |
| E2F3 | CCCGGAGGGCCGAACAGACGUUUAAGAGCUAUGCUGGAAACAGCAUAGCAAGU | 1078 |
| | UUAAAUAAGGCUAGUCCGUUAUCAACUUGAAAAAGUGGCACCGAGUCGGUGC | |
| EBF3 | GGAAAGGGUCCAUUCCUCGGUUUAAGAGCUAUGCUGGAAACAGCAUAGCAAGU | 1079 |
| | UUAAAUAAGGCUAGUCCGUUAUCAACUUGAAAAAGUGGCACCGAGUCGGUGC | |
| EGR2 | CAGCAGCCGGAACACAGACGUUUAAGAGCUAUGCUGGAAACAGCAUAGCAAGU | 1080 |
| | UUAAAUAAGGCUAGUCCGUUAUCAACUUGAAAAAGUGGCACCGAGUCGGUGC | |
| EHF | AAUCUCACCAGCUCCUAUAGUUUAAGAGCUAUGCUGGAAACAGCAUAGCAAGU | 1081 |
| | UUAAAUAAGGCUAGUCCGUUAUCAACUUGAAAAAGUGGCACCGAGUCGGUGC | |
| ELF5 | GUGGCUAGGUCCAAAGAGGGUUUAAGAGCUAUGCUGGAAACAGCAUAGCAAGU | 1082 |
| | UUAAAUAAGGCUAGUCCGUUAUCAACUUGAAAAAGUGGCACCGAGUCGGUGC | |
| ELF5 | AGGCUUUCAAGGCAAGAGAGUUUAAGAGCUAUGCUGGAAACAGCAUAGCAAGU | 1083 |
| | UUAAAUAAGGCUAGUCCGUUAUCAACUUGAAAAAGUGGCACCGAGUCGGUGC | |
| ELMSAN1 | GCGCCGUUGGCCUGAGGUAGUUUAAGAGCUAUGCUGGAAACAGCAUAGCAAGU | 1084 |
| | UUAAAUAAGGCUAGUCCGUUAUCAACUUGAAAAAGUGGCACCGAGUCGGUGC | |
| EMX1 | AGGCCGCUAGAAUGGACCCGUUUAAGAGCUAUGCUGGAAACAGCAUAGCAAGU | 1085 |
| | UUAAAUAAGGCUAGUCCGUUAUCAACUUGAAAAAGUGGCACCGAGUCGGUGC | |
| ETS2 | CUCCAGAGACUGACGAGUGGUUUAAGAGCUAUGCUGGAAACAGCAUAGCAAGU | 1086 |
| | UUAAAUAAGGCUAGUCCGUUAUCAACUUGAAAAAGUGGCACCGAGUCGGUGC | |
| ETV4 | CCUCAGGUGAGGCUGCGGGGUUUAAGAGCUAUGCUGGAAACAGCAUAGCAAGU | 1087 |
| | UUAAAUAAGGCUAGUCCGUUAUCAACUUGAAAAAGUGGCACCGAGUCGGUGC | |
| ETV4 | CUUUUGUGAAUGGAACCCCGUUUAAGAGCUAUGCUGGAAACAGCAUAGCAAGU | 1088 |
| | UUAAAUAAGGCUAGUCCGUUAUCAACUUGAAAAAGUGGCACCGAGUCGGUGC | |
| ETV6 | CGGCUGCCGGGAGAGAUGCGUUUAAGAGCUAUGCUGGAAACAGCAUAGCAAGU | 1089 |
| | UUAAAUAAGGCUAGUCCGUUAUCAACUUGAAAAAGUGGCACCGAGUCGGUGC | |
| EZH1 | ACCCGCGGCUCGGGAUGGAGUUUAAGAGCUAUGCUGGAAACAGCAUAGCAAGU | 1090 |
| | UUAAAUAAGGCUAGUCCGUUAUCAACUUGAAAAAGUGGCACCGAGUCGGUGC | |
| FERD3L | CACAUCCAUUGGCAGAUGGGUUUAAGAGCUAUGCUGGAAACAGCAUAGCAAGU | 1091 |
| | UUAAAUAAGGCUAGUCCGUUAUCAACUUGAAAAAGUGGCACCGAGUCGGUGC | |
| FERD3L | AACAAGGAACUGUCCCGGGGUUUAAGAGCUAUGCUGGAAACAGCAUAGCAAGU | 1092 |
| | UUAAAUAAGGCUAGUCCGUUAUCAACUUGAAAAAGUGGCACCGAGUCGGUGC | |
| FIZ1 | CCGACAUUUUGGGCAGCGGGUUUAAGAGCUAUGCUGGAAACAGCAUAGCAAGU | 1093 |
| | UUAAAUAAGGCUAGUCCGUUAUCAACUUGAAAAAGUGGCACCGAGUCGGUGC | |
| FOS | UAGUAAGAGAGGCUAUCCCGUUUAAGAGCUAUGCUGGAAACAGCAUAGCAAGU | 1094 |
| | UUAAAUAAGGCUAGUCCGUUAUCAACUUGAAAAAGUGGCACCGAGUCGGUGC | |
| FOSB | CAGAGCUACGGCCACGGCAGUUUAAGAGCUAUGCUGGAAACAGCAUAGCAAGU | 1095 |
| | UUAAAUAAGGCUAGUCCGUUAUCAACUUGAAAAAGUGGCACCGAGUCGGUGC | |
| FOXA1 | GCAGCCCGCUCACUUCCCGGUUUAAGAGCUAUGCUGGAAACAGCAUAGCAAGU | 1096 |
| | UUAAAUAAGGCUAGUCCGUUAUCAACUUGAAAAAGUGGCACCGAGUCGGUGC | |
| FOXA2 | AGCUACUAUGCAGAGCCCGGUUUAAGAGCUAUGCUGGAAACAGCAUAGCAAGU | 1097 |
| | UUAAAUAAGGCUAGUCCGUUAUCAACUUGAAAAAGUGGCACCGAGUCGGUGC | |
| FOXA3 | CUCGGGACAGCCGUACCCCGUUUAAGAGCUAUGCUGGAAACAGCAUAGCAAGU | 1098 |
| | UUAAAUAAGGCUAGUCCGUUAUCAACUUGAAAAAGUGGCACCGAGUCGGUGC | |
| FOXC2 | CGGCGCUCGGGCCGAGCAGGUUUAAGAGCUAUGCUGGAAACAGCAUAGCAAGU | 1099 |
| | UUAAAUAAGGCUAGUCCGUUAUCAACUUGAAAAAGUGGCACCGAGUCGGUGC | |
| FOXD3 | CGCAGGGUGCAGGCCGUAGGUUUAAGAGCUAUGCUGGAAACAGCAUAGCAAGU | 1100 |
| | UUAAAUAAGGCUAGUCCGUUAUCAACUUGAAAAAGUGGCACCGAGUCGGUGC | |
| FOXE1 | UCCCCUGCACACACCGGACGUUUAAGAGCUAUGCUGGAAACAGCAUAGCAAGU | 1101 |
| | UUAAAUAAGGCUAGUCCGUUAUCAACUUGAAAAAGUGGCACCGAGUCGGUGC | |
| FOXJ3 | GGCCUCGACCGCUCGCAGUGUUUAAGAGCUAUGCUGGAAACAGCAUAGCAAGU | 1102 |
| | UUAAAUAAGGCUAGUCCGUUAUCAACUUGAAAAAGUGGCACCGAGUCGGUGC | |
| FOXN2 | AGUCGCCUCCGGGAAGACGGUUUAAGAGCUAUGCUGGAAACAGCAUAGCAAGU | 1103 |
| | UUAAAUAAGGCUAGUCCGUUAUCAACUUGAAAAAGUGGCACCGAGUCGGUGC | |
| FOXN4 | ACGCGAGGGGCGAGCGCGAGUUUAAGAGCUAUGCUGGAAACAGCAUAGCAAGU | 1104 |
| | UUAAAUAAGGCUAGUCCGUUAUCAACUUGAAAAAGUGGCACCGAGUCGGUGC | |
| FOXO1 | CCGCAGGAGAGCCAAGAGGGUUUAAGAGCUAUGCUGGAAACAGCAUAGCAAGU | 1105 |
| | UUAAAUAAGGCUAGUCCGUUAUCAACUUGAAAAAGUGGCACCGAGUCGGUGC | |
| FOXP3 | AGAGCAGGGACACUCACCUGUUUAAGAGCUAUGCUGGAAACAGCAUAGCAAGU | 1106 |
| | UUAAAUAAGGCUAGUCCGUUAUCAACUUGAAAAAGUGGCACCGAGUCGGUGC | |
| FOXS1 | AUGACCGCAAGCCAGGCAAGUUUAAGAGCUAUGCUGGAAACAGCAUAGCAAGU | 1107 |
| | UUAAAUAAGGCUAGUCCGUUAUCAACUUGAAAAAGUGGCACCGAGUCGGUGC | |
| GATA2 | GCGAGGCCAGCGUCGCCCCGUUUAAGAGCUAUGCUGGAAACAGCAUAGCAAGU | 1108 |
| | UUAAAUAAGGCUAGUCCGUUAUCAACUUGAAAAAGUGGCACCGAGUCGGUGC | |
| GATA3 | UCGCUACCCAGGUUGGUACGUUUAAGAGCUAUGCUGGAAACAGCAUAGCAAGU | 1109 |
| | UUAAAUAAGGCUAGUCCGUUAUCAACUUGAAAAAGUGGCACCGAGUCGGUGC | |
| GATAD2A | CUCCAUGUGUGCGGCCGAGGUUUAAGAGCUAUGCUGGAAACAGCAUAGCAAGU | 1110 |
| | UUAAAUAAGGCUAGUCCGUUAUCAACUUGAAAAAGUGGCACCGAGUCGGUGC | |
| GCM2 | CAAUGGUUAUGGACCCGGGGUUUAAGAGCUAUGCUGGAAACAGCAUAGCAAGU | 1111 |
| | UUAAAUAAGGCUAGUCCGUUAUCAACUUGAAAAAGUGGCACCGAGUCGGUGC | |
| GFI1 | GGCUCGGCGGACCUACCUGGUUUAAGAGCUAUGCUGGAAACAGCAUAGCAAGU | 1112 |
| | UUAAAUAAGGCUAGUCCGUUAUCAACUUGAAAAAGUGGCACCGAGUCGGUGC | |
| GLI2 | UUGCUUGCCAAGGGGCCCAGUUUAAGAGCUAUGCUGGAAACAGCAUAGCAAGU | 1113 |
| | UUAAAUAAGGCUAGUCCGUUAUCAACUUGAAAAAGUGGCACCGAGUCGGUGC | |
| GLYR1 | CGGCUGUGAGUCUGCGGCUGUUUAAGAGCUAUGCUGGAAACAGCAUAGCAAGU | 1114 |
| | UUAAAUAAGGCUAGUCCGUUAUCAACUUGAAAAAGUGGCACCGAGUCGGUGC | |
| GPBP1L1 | CAGCUUGUCGACCCGGCAGGUUUAAGAGCUAUGCUGGAAACAGCAUAGCAAGU | 1115 |
| | UUAAAUAAGGCUAGUCCGUUAUCAACUUGAAAAAGUGGCACCGAGUCGGUGC | |
| GRHL1 | ACAGUACACCCGAUCCGGGGUUUAAGAGCUAUGCUGGAAACAGCAUAGCAAGU | 1116 |
| | UUAAAUAAGGCUAGUCCGUUAUCAACUUGAAAAAGUGGCACCGAGUCGGUGC | |
| GTF2B | GCCUCCGGGCAGCCUCGUAGUUUAAGAGCUAUGCUGGAAACAGCAUAGCAAGU | 1117 |
| | UUAAAUAAGGCUAGUCCGUUAUCAACUUGAAAAAGUGGCACCGAGUCGGUGC | |
| GTF2I | GCGAGGGGCCCGUGCGUGUGUUUAAGAGCUAUGCUGGAAACAGCAUAGCAAGU | 1118 |
| | UUAAAUAAGGCUAGUCCGUUAUCAACUUGAAAAAGUGGCACCGAGUCGGUGC | |
| HDAC2 | GCUCGGUACCACCCGGCAGGUUUAAGAGCUAUGCUGGAAACAGCAUAGCAAGU | 1119 |
| | UUAAAUAAGGCUAGUCCGUUAUCAACUUGAAAAAGUGGCACCGAGUCGGUGC | |
| HES2 | GGGUCUCAACUGUUACGUGGUUUAAGAGCUAUGCUGGAAACAGCAUAGCAAGU | 1120 |
| | UUAAAUAAGGCUAGUCCGUUAUCAACUUGAAAAAGUGGCACCGAGUCGGUGC | |
| HES7 | GGAGGAGCAAUGGUCACCCGUUUAAGAGCUAUGCUGGAAACAGCAUAGCAAGU | 1121 |
| | UUAAAUAAGGCUAGUCCGUUAUCAACUUGAAAAAGUGGCACCGAGUCGGUGC | |
| HESX1 | GCUCUGCCCCACGUGUAUAGUUUAAGAGCUAUGCUGGAAACAGCAUAGCAAGU | 1122 |
| | UUAAAUAAGGCUAGUCCGUUAUCAACUUGAAAAAGUGGCACCGAGUCGGUGC | |
| HEY1 | GAGCUGGACGAGACCAUCGGUUUAAGAGCUAUGCUGGAAACAGCAUAGCAAGU | 1123 |
| | UUAAAUAAGGCUAGUCCGUUAUCAACUUGAAAAAGUGGCACCGAGUCGGUGC | |
| HIF3A | UACGAGUGGGUGCGCACGGGUUUAAGAGCUAUGCUGGAAACAGCAUAGCAAGU | 1124 |
| | UUAAAUAAGGCUAGUCCGUUAUCAACUUGAAAAAGUGGCACCGAGUCGGUGC | |
| HIVEP3 | GGAGAACUGUGUUGGAGGGGUUUAAGAGCUAUGCUGGAAACAGCAUAGCAAGU | 1125 |
| | UUAAAUAAGGCUAGUCCGUUAUCAACUUGAAAAAGUGGCACCGAGUCGGUGC | |
| HLF | AGGAAAAGUGAUAAAAGAGGUUUAAGAGCUAUGCUGGAAACAGCAUAGCAAGU | 1126 |
| | UUAAAUAAGGCUAGUCCGUUAUCAACUUGAAAAAGUGGCACCGAGUCGGUGC | |
| HLX | GCAGUAAGCGGCCGACCAGGUUUAAGAGCUAUGCUGGAAACAGCAUAGCAAGU | 1127 |
| | UUAAAUAAGGCUAGUCCGUUAUCAACUUGAAAAAGUGGCACCGAGUCGGUGC | |
| HMG20A | AAGUGAAGGCGAUUGAGAGGUUUAAGAGCUAUGCUGGAAACAGCAUAGCAAGU | 1128 |
| | UUAAAUAAGGCUAGUCCGUUAUCAACUUGAAAAAGUGGCACCGAGUCGGUGC | |
| HMGA2 | AUCAACACCGGACGUCCAGGUUUAAGAGCUAUGCUGGAAACAGCAUAGCAAGU | 1129 |
| | UUAAAUAAGGCUAGUCCGUUAUCAACUUGAAAAAGUGGCACCGAGUCGGUGC | |
| HMGA2 | UUCGGGAGAUGAGGUGAUAGUUUAAGAGCUAUGCUGGAAACAGCAUAGCAAGU | 1130 |
| | UUAAAUAAGGCUAGUCCGUUAUCAACUUGAAAAAGUGGCACCGAGUCGGUGC | |
| HMGA2 | GUCCCUGGGCUGAAGUGGAGUUUAAGAGCUAUGCUGGAAACAGCAUAGCAAGU | 1131 |
| | UUAAAUAAGGCUAGUCCGUUAUCAACUUGAAAAAGUGGCACCGAGUCGGUGC | |
| HMGN3 | CCUCAUUGGAGCAGCAGGGGUUUAAGAGCUAUGCUGGAAACAGCAUAGCAAGU | 1132 |
| | UUAAAUAAGGCUAGUCCGUUAUCAACUUGAAAAAGUGGCACCGAGUCGGUGC | |
| HMX2 | GGGACAUGCAGGCACCGGAGUUUAAGAGCUAUGCUGGAAACAGCAUAGCAAGU | 1133 |
| | UUAAAUAAGGCUAGUCCGUUAUCAACUUGAAAAAGUGGCACCGAGUCGGUGC | |
| HNF1A | AUGUAAACAGAACAGGCAGGUUUAAGAGCUAUGCUGGAAACAGCAUAGCAAGU | 1134 |
| | UUAAAUAAGGCUAGUCCGUUAUCAACUUGAAAAAGUGGCACCGAGUCGGUGC | |
| HNF4G | AGAUUCUAUAUAAUUCAAGGUUUAAGAGCUAUGCUGGAAACAGCAUAGCAAGU | 1135 |
| | UUAAAUAAGGCUAGUCCGUUAUCAACUUGAAAAAGUGGCACCGAGUCGGUGC | |
| HNF4G | AGCCGCCCGAGGGGAACCGGUUUAAGAGCUAUGCUGGAAACAGCAUAGCAAGU | 1136 |
| | UUAAAUAAGGCUAGUCCGUUAUCAACUUGAAAAAGUGGCACCGAGUCGGUGC | |
| HOXA1 | UUCUUCUCCGGCCCCAUGGGUUUAAGAGCUAUGCUGGAAACAGCAUAGCAAGU | 1137 |
| | UUAAAUAAGGCUAGUCCGUUAUCAACUUGAAAAAGUGGCACCGAGUCGGUGC | |
| HOXA11 | GGCGCGAAGACGGGGUCUGGUUUAAGAGCUAUGCUGGAAACAGCAUAGCAAGU | 1138 |
| | UUAAAUAAGGCUAGUCCGUUAUCAACUUGAAAAAGUGGCACCGAGUCGGUGC | |
| HOXB1 | AUACUGCCGAAAGGUUGUAGUUUAAGAGCUAUGCUGGAAACAGCAUAGCAAGU | 1139 |
| | UUAAAUAAGGCUAGUCCGUUAUCAACUUGAAAAAGUGGCACCGAGUCGGUGC | |
| HOXB2 | GGUGGGGAGAUUUUCCCCUGUUUAAGAGCUAUGCUGGAAACAGCAUAGCAAGU | 1140 |
| | UUAAAUAAGGCUAGUCCGUUAUCAACUUGAAAAAGUGGCACCGAGUCGGUGC | |
| HOXB3 | UUAACUGCUCGCUGUGGUGGUUUAAGAGCUAUGCUGGAAACAGCAUAGCAAGU | 1141 |
| | UUAAAUAAGGCUAGUCCGUUAUCAACUUGAAAAAGUGGCACCGAGUCGGUGC | |
| HOXC12 | ACACUGGGCUGCCGAGGUAGUUUAAGAGCUAUGCUGGAAACAGCAUAGCAAGU | 1142 |
| | UUAAAUAAGGCUAGUCCGUUAUCAACUUGAAAAAGUGGCACCGAGUCGGUGC | |
| HOXC9 | CCGUACGGGUGAUAUACCAGUUUAAGAGCUAUGCUGGAAACAGCAUAGCAAGU | 1143 |
| | UUAAAUAAGGCUAGUCCGUUAUCAACUUGAAAAAGUGGCACCGAGUCGGUGC | |
| HOXC9 | GGCUUGGGCGCGAAGCUACGUUUAAGAGCUAUGCUGGAAACAGCAUAGCAAGU | 1144 |
| | UUAAAUAAGGCUAGUCCGUUAUCAACUUGAAAAAGUGGCACCGAGUCGGUGC | |
| HOXD9 | CGGCGGACAGUGUAAUGUUGUUUAAGAGCUAUGCUGGAAACAGCAUAGCAAGU | 1145 |
| | UUAAAUAAGGCUAGUCCGUUAUCAACUUGAAAAAGUGGCACCGAGUCGGUGC | |
| HSF4 | GCAUGGUGCAGUCUCGGCCGUUUAAGAGCUAUGCUGGAAACAGCAUAGCAAGU | 1146 |
| | UUAAAUAAGGCUAGUCCGUUAUCAACUUGAAAAAGUGGCACCGAGUCGGUGC | |
| HSF5 | CAGGGCGAGGCGAAGGCCGGUUUAAGAGCUAUGCUGGAAACAGCAUAGCAAGU | 1147 |
| | UUAAAUAAGGCUAGUCCGUUAUCAACUUGAAAAAGUGGCACCGAGUCGGUGC | |
| IKZF1 | UGCGCCGCGCGGGGACCCAGUUUAAGAGCUAUGCUGGAAACAGCAUAGCAAGU | 1148 |
| | UUAAAUAAGGCUAGUCCGUUAUCAACUUGAAAAAGUGGCACCGAGUCGGUGC | |
| IKZF2 | GCAGUGGAUCUGUAGCUAAGUUUAAGAGCUAUGCUGGAAACAGCAUAGCAAGU | 1149 |
| | UUAAAUAAGGCUAGUCCGUUAUCAACUUGAAAAAGUGGCACCGAGUCGGUGC | |
| IKZF3 | GCGCGCUGAGUCCAGGCGAGUUUAAGAGCUAUGCUGGAAACAGCAUAGCAAGU | 1150 |
| | UUAAAUAAGGCUAGUCCGUUAUCAACUUGAAAAAGUGGCACCGAGUCGGUGC | |
| IKZF4 | UCCCUCGCCGUUUCCAAGGGUUUAAGAGCUAUGCUGGAAACAGCAUAGCAAGU | 1151 |
| | UUAAAUAAGGCUAGUCCGUUAUCAACUUGAAAAAGUGGCACCGAGUCGGUGC | |
| IRF7 | CUCUGGCACCCAGGUACUGGUUUAAGAGCUAUGCUGGAAACAGCAUAGCAAGU | 1152 |
| | UUAAAUAAGGCUAGUCCGUUAUCAACUUGAAAAAGUGGCACCGAGUCGGUGC | |
| IRX3 | GUAAGGCAGCCAAAAGUUGGUUUAAGAGCUAUGCUGGAAACAGCAUAGCAAGU | 1153 |
| | UUAAAUAAGGCUAGUCCGUUAUCAACUUGAAAAAGUGGCACCGAGUCGGUGC | |
| ISL2 | ACUAACUCCUACUGCCCCGGUUUAAGAGCUAUGCUGGAAACAGCAUAGCAAGU | 1154 |
| | UUAAAUAAGGCUAGUCCGUUAUCAACUUGAAAAAGUGGCACCGAGUCGGUGC | |
| RK | AGUGGCCGGCACUUCCGGCGUUUAAGAGCUAUGCUGGAAACAGCAUAGCAAGU | 1155 |
| | UUAAAUAAGGCUAGUCCGUUAUCAACUUGAAAAAGUGGCACCGAGUCGGUGC | |
| JRK | UCCUGACCGUCAUCAGCAAGUUUAAGAGCUAUGCUGGAAACAGCAUAGCAAGU | 1156 |
| | UUAAAUAAGGCUAGUCCGUUAUCAACUUGAAAAAGUGGCACCGAGUCGGUGC | |
| JRKL | GACUGCCGCGCGAUAGUCAGUUUAAGAGCUAUGCUGGAAACAGCAUAGCAAGU | 1157 |
| | UUAAAUAAGGCUAGUCCGUUAUCAACUUGAAAAAGUGGCACCGAGUCGGUGC | |
| KAT7 | GCUCCAGACGCUGAGAGGCGUUUAAGAGCUAUGCUGGAAACAGCAUAGCAAGU | 1158 |
| | UUAAAUAAGGCUAGUCCGUUAUCAACUUGAAAAAGUGGCACCGAGUCGGUGC | |
| KDM1A | CACGGAGCGACAGAGCGAGGUUUAAGAGCUAUGCUGGAAACAGCAUAGCAAGU | 1159 |
| | UUAAAUAAGGCUAGUCCGUUAUCAACUUGAAAAAGUGGCACCGAGUCGGUGC | |
| KDM2B | CUCGGCUUCCAUACCUAUAGUUUAAGAGCUAUGCUGGAAACAGCAUAGCAAGU | 1160 |
| | UUAAAUAAGGCUAGUCCGUUAUCAACUUGAAAAAGUGGCACCGAGUCGGUGC | |
| KDM5D | AACUAGGAUCCCUGACGAUGUUUAAGAGCUAUGCUGGAAACAGCAUAGCAAGU | 1161 |
| | UUAAAUAAGGCUAGUCCGUUAUCAACUUGAAAAAGUGGCACCGAGUCGGUGC | |
| KLF14 | CUCGGCGGCGAAGUAGUCCGUUUAAGAGCUAUGCUGGAAACAGCAUAGCAAGU | 1162 |
| | UUAAAUAAGGCUAGUCCGUUAUCAACUUGAAAAAGUGGCACCGAGUCGGUGC | |
| KLF9 | CAAGGGAGCCGGCUCAGAGGUUUAAGAGCUAUGCUGGAAACAGCAUAGCAAGU | 1163 |
| | UUAAAUAAGGCUAGUCCGUUAUCAACUUGAAAAAGUGGCACCGAGUCGGUGC | |
| KMT2B | CAUCUUGGCACCGUGAGAGGUUUAAGAGCUAUGCUGGAAACAGCAUAGCAAGU | 1164 |
| | UUAAAUAAGGCUAGUCCGUUAUCAACUUGAAAAAGUGGCACCGAGUCGGUGC | |
| KMT2B | GGGCCAAAAAAGUAAAGAUGUUUAAGAGCUAUGCUGGAAACAGCAUAGCAAGU | 1165 |
| | UUAAAUAAGGCUAGUCCGUUAUCAACUUGAAAAAGUGGCACCGAGUCGGUGC | |
| L3MBTL4 | ACGCCGACCGAGCUACAGGGUUUAAGAGCUAUGCUGGAAACAGCAUAGCAAGU | 1166 |
| | UUAAAUAAGGCUAGUCCGUUAUCAACUUGAAAAAGUGGCACCGAGUCGGUGC | |
| LEF1 | GCUCUCGGGCCGAGGAACCGUUUAAGAGCUAUGCUGGAAACAGCAUAGCAAGU | 1167 |
| | UUAAAUAAGGCUAGUCCGUUAUCAACUUGAAAAAGUGGCACCGAGUCGGUGC | |
| LHX6 | AGAAGCUGGCGGACAUGACGUUUAAGAGCUAUGCUGGAAACAGCAUAGCAAGU | 1168 |
| | UUAAAUAAGGCUAGUCCGUUAUCAACUUGAAAAAGUGGCACCGAGUCGGUGC | |
| LHX9 | GGGAACUUGCAAGCAGCCAGUUUAAGAGCUAUGCUGGAAACAGCAUAGCAAGU | 1169 |
| | UUAAAUAAGGCUAGUCCGUUAUCAACUUGAAAAAGUGGCACCGAGUCGGUGC | |
| LIN28A | AAGUCCGAAGGCAAAGGGUGUUUAAGAGCUAUGCUGGAAACAGCAUAGCAAGU | 1170 |
| | UUAAAUAAGGCUAGUCCGUUAUCAACUUGAAAAAGUGGCACCGAGUCGGUGC | |
| LIN28A | CGUGCGCGCCAGACUACGUGUUUAAGAGCUAUGCUGGAAACAGCAUAGCAAGU | 1171 |
| | UUAAAUAAGGCUAGUCCGUUAUCAACUUGAAAAAGUGGCACCGAGUCGGUGC | |
| LMX1A | CCUCCGGCUGCAGUCUCGGGUUUAAGAGCUAUGCUGGAAACAGCAUAGCAAGU | 1172 |
| | UUAAAUAAGGCUAGUCCGUUAUCAACUUGAAAAAGUGGCACCGAGUCGGUGC | |
| MAF | AGAGGUGCAGCCCGACUGGGUUUAAGAGCUAUGCUGGAAACAGCAUAGCAAGU | 1173 |
| | UUAAAUAAGGCUAGUCCGUUAUCAACUUGAAAAAGUGGCACCGAGUCGGUGC | |
| MAFF | CCCGGUUCAGAGCGACCUGGUUUAAGAGCUAUGCUGGAAACAGCAUAGCAAGU | 1174 |
| | UUAAAUAAGGCUAGUCCGUUAUCAACUUGAAAAAGUGGCACCGAGUCGGUGC | |
| MBD3 | AGAAGUGCCCAGAAGGUCGGUUUAAGAGCUAUGCUGGAAACAGCAUAGCAAGU | 1175 |
| | UUAAAUAAGGCUAGUCCGUUAUCAACUUGAAAAAGUGGCACCGAGUCGGUGC | |
| MBD4 | CCGGUGCCGUGAGCUGAAGGUUUAAGAGCUAUGCUGGAAACAGCAUAGCAAGU | 1176 |
| | UUAAAUAAGGCUAGUCCGUUAUCAACUUGAAAAAGUGGCACCGAGUCGGUGC | |
| MBNL2 | GAAAGCCGUCUGCCGUAUCGUUUAAGAGCUAUGCUGGAAACAGCAUAGCAAGU | 1177 |
| | UUAAAUAAGGCUAGUCCGUUAUCAACUUGAAAAAGUGGCACCGAGUCGGUGC | |
| MED1 | AAGAAGAGAAGGGUGCUCGGUUUAAGAGCUAUGCUGGAAACAGCAUAGCAAGU | 1178 |
| | UUAAAUAAGGCUAGUCCGUUAUCAACUUGAAAAAGUGGCACCGAGUCGGUGC | |
| MED14 | CUGCAGAGGACCUUCCGACGUUUAAGAGCUAUGCUGGAAACAGCAUAGCAAGU | 1179 |
| | UUAAAUAAGGCUAGUCCGUUAUCAACUUGAAAAAGUGGCACCGAGUCGGUGC | |
| MED23 | AAGCGACGCCGAGGAGCUAGUUUAAGAGCUAUGCUGGAAACAGCAUAGCAAGU | 1180 |
| | UUAAAUAAGGCUAGUCCGUUAUCAACUUGAAAAAGUGGCACCGAGUCGGUGC | |
| MED24 | UGUGCGGUAGGCUUAAAUUGUUUAAGAGCUAUGCUGGAAACAGCAUAGCAAGU | 1181 |
| | UUAAAUAAGGCUAGUCCGUUAUCAACUUGAAAAAGUGGCACCGAGUCGGUGC | |
| MEF2C | UAGCAGCCCGAAGAUGUCUGUUUAAGAGCUAUGCUGGAAACAGCAUAGCAAGU | 1182 |
| | UUAAAUAAGGCUAGUCCGUUAUCAACUUGAAAAAGUGGCACCGAGUCGGUGC | |
| MEF2D | CGGGAGUCGAGGCCGACGUGUUUAAGAGCUAUGCUGGAAACAGCAUAGCAAGU | 1183 |
| | UUAAAUAAGGCUAGUCCGUUAUCAACUUGAAAAAGUGGCACCGAGUCGGUGC | |
| MEIS3 | CAACACCGCGGGCCGUCAGGUUUAAGAGCUAUGCUGGAAACAGCAUAGCAAGU | 1184 |
| | UUAAAUAAGGCUAGUCCGUUAUCAACUUGAAAAAGUGGCACCGAGUCGGUGC | |
| MESP1 | CUGGAGACUCUCCUCGCUGGUUUAAGAGCUAUGCUGGAAACAGCAUAGCAAGU | 1185 |
| | UUAAAUAAGGCUAGUCCGUUAUCAACUUGAAAAAGUGGCACCGAGUCGGUGC | |
| MESP1 | GCCUAGCACGGCCGACAGGGUUUAAGAGCUAUGCUGGAAACAGCAUAGCAAGU | 1186 |
| | UUAAAUAAGGCUAGUCCGUUAUCAACUUGAAAAAGUGGCACCGAGUCGGUGC | |
| MGA | GACCACAGGGGCGCGCCAAGUUUAAGAGCUAUGCUGGAAACAGCAUAGCAAGU | 1187 |
| | UUAAAUAAGGCUAGUCCGUUAUCAACUUGAAAAAGUGGCACCGAGUCGGUGC | |
| MITF | UUGGAAUUAUAGAAAGUAGGUUUAAGAGCUAUGCUGGAAACAGCAUAGCAAGU | 1188 |
| | UUAAAUAAGGCUAGUCCGUUAUCAACUUGAAAAAGUGGCACCGAGUCGGUGC | |
| MLX | CCUUGACCCAAGGGUCCUCGUUUAAGAGCUAUGCUGGAAACAGCAUAGCAAGU | 1189 |
| | UUAAAUAAGGCUAGUCCGUUAUCAACUUGAAAAAGUGGCACCGAGUCGGUGC | |
| MNX1 | GCGCGGGUCCCCACCACGGGUUUAAGAGCUAUGCUGGAAACAGCAUAGCAAGU | 1190 |
| | UUAAAUAAGGCUAGUCCGUUAUCAACUUGAAAAAGUGGCACCGAGUCGGUGC | |
| MYF5 | CCGAUGGGCAAAUCCCGGGGUUUAAGAGCUAUGCUGGAAACAGCAUAGCAAGU | 1191 |
| | UUAAAUAAGGCUAGUCCGUUAUCAACUUGAAAAAGUGGCACCGAGUCGGUGC | |
| MYOG | CGGGGUUCCUGGUAGAAGUGUUUAAGAGCUAUGCUGGAAACAGCAUAGCAAGU | 1192 |
| | UUAAAUAAGGCUAGUCCGUUAUCAACUUGAAAAAGUGGCACCGAGUCGGUGC | |
| MYPOP | GGAGCCGGUGAGUGACCCGGUUUAAGAGCUAUGCUGGAAACAGCAUAGCAAGU | 1193 |
| | UUAAAUAAGGCUAGUCCGUUAUCAACUUGAAAAAGUGGCACCGAGUCGGUGC | |
| MYRFL | CUUCAUUAUCAGAAAGUAGGUUUAAGAGCUAUGCUGGAAACAGCAUAGCAAGU | 1194 |
| | UUAAAUAAGGCUAGUCCGUUAUCAACUUGAAAAAGUGGCACCGAGUCGGUGC | |
| MYT1L | GUGCUUCAACAAGACUGCAGUUUAAGAGCUAUGCUGGAAACAGCAUAGCAAGU | 1195 |
| | UUAAAUAAGGCUAGUCCGUUAUCAACUUGAAAAAGUGGCACCGAGUCGGUGC | |
| NCOR1 | UCCCGGGGCAGCAGCCGCUGUUUAAGAGCUAUGCUGGAAACAGCAUAGCAAGU | 1196 |
| | UUAAAUAAGGCUAGUCCGUUAUCAACUUGAAAAAGUGGCACCGAGUCGGUGC | |
| NEUROG1 | CUCGUGUGAGCACCGAGUGGUUUAAGAGCUAUGCUGGAAACAGCAUAGCAAGU | 1197 |
| | UUAAAUAAGGCUAGUCCGUUAUCAACUUGAAAAAGUGGCACCGAGUCGGUGC | |
| NFAT5 | GUCCCCGUCCCGCCGGGGGGUUUAAGAGCUAUGCUGGAAACAGCAUAGCAAGU | 1198 |
| | UUAAAUAAGGCUAGUCCGUUAUCAACUUGAAAAAGUGGCACCGAGUCGGUGC | |
| NFATC2 | GCGAUCCGGCUUACUCCAGGUUUAAGAGCUAUGCUGGAAACAGCAUAGCAAGU | 1199 |
| | UUAAAUAAGGCUAGUCCGUUAUCAACUUGAAAAAGUGGCACCGAGUCGGUGC | |
| NFATC2 | AGAGGCUGCGUUCAGACUGGUUUAAGAGCUAUGCUGGAAACAGCAUAGCAAGU | 1200 |
| | UUAAAUAAGGCUAGUCCGUUAUCAACUUGAAAAAGUGGCACCGAGUCGGUGC | |
| NFATC3 | GAGGCUUAGGCACCGGUGGGUUUAAGAGCUAUGCUGGAAACAGCAUAGCAAGU | 1201 |
| | UUAAAUAAGGCUAGUCCGUUAUCAACUUGAAAAAGUGGCACCGAGUCGGUGC | |
| NFE2L1 | CCCUGGAGGCUAGAAGCUCGUUUAAGAGCUAUGCUGGAAACAGCAUAGCAAGU | 1202 |
| | UUAAAUAAGGCUAGUCCGUUAUCAACUUGAAAAAGUGGCACCGAGUCGGUGC | |
| NFE2L3 | GGGUCCGCACGUGUCACCCGUUUAAGAGCUAUGCUGGAAACAGCAUAGCAAGU | 1203 |
| | UUAAAUAAGGCUAGUCCGUUAUCAACUUGAAAAAGUGGCACCGAGUCGGUGC | |
| NFIA | UCCACGCCGCGGCUUACCUGUUUAAGAGCUAUGCUGGAAACAGCAUAGCAAGU | 1204 |
| | UUAAAUAAGGCUAGUCCGUUAUCAACUUGAAAAAGUGGCACCGAGUCGGUGC | |
| NFYB | CCCCGGGCCCGGAGCUCAAGUUUAAGAGCUAUGCUGGAAACAGCAUAGCAAGU | 1205 |
| | UUAAAUAAGGCUAGUCCGUUAUCAACUUGAAAAAGUGGCACCGAGUCGGUGC | |
| NKX1-2 | CGGGAAGCCAGGAAAAGUUGUUUAAGAGCUAUGCUGGAAACAGCAUAGCAAGU | 1206 |
| | UUAAAUAAGGCUAGUCCGUUAUCAACUUGAAAAAGUGGCACCGAGUCGGUGC | |
| NKX2-3 | GUCUGUCAAAAGCCCGACUGUUUAAGAGCUAUGCUGGAAACAGCAUAGCAAGU | 1207 |
| | UUAAAUAAGGCUAGUCCGUUAUCAACUUGAAAAAGUGGCACCGAGUCGGUGC | |
| NKX2-4 | GCCUGUGACGAGGAGUCGGGUUUAAGAGCUAUGCUGGAAACAGCAUAGCAAGU | 1208 |
| | UUAAAUAAGGCUAGUCCGUUAUCAACUUGAAAAAGUGGCACCGAGUCGGUGC | |
| NKX2-5 | GCCAGCUCUGGAUGUGUCCGUUUAAGAGCUAUGCUGGAAACAGCAUAGCAAGU | 1209 |
| | UUAAAUAAGGCUAGUCCGUUAUCAACUUGAAAAAGUGGCACCGAGUCGGUGC | |
| NOTCH3 | UGGGCUCCGGGCGCGUCCCGUUUAAGAGCUAUGCUGGAAACAGCAUAGCAAGU | 1210 |
| | UUAAAUAAGGCUAGUCCGUUAUCAACUUGAAAAAGUGGCACCGAGUCGGUGC | |
| NOTO | CAGGAGGUUCCCAGACAACGUUUAAGAGCUAUGCUGGAAACAGCAUAGCAAGU | 1211 |
| | UUAAAUAAGGCUAGUCCGUUAUCAACUUGAAAAAGUGGCACCGAGUCGGUGC | |
| NOTO | CCUGGGGCUAGGCAUGACGGUUUAAGAGCUAUGCUGGAAACAGCAUAGCAAGU | 1212 |
| | UUAAAUAAGGCUAGUCCGUUAUCAACUUGAAAAAGUGGCACCGAGUCGGUGC | |
| NR1H2 | GCGGGGUUGCCGGAAGAAGGUUUAAGAGCUAUGCUGGAAACAGCAUAGCAAGU | 1213 |
| | UUAAAUAAGGCUAGUCCGUUAUCAACUUGAAAAAGUGGCACCGAGUCGGUGC | |
| NR1H4 | AAAUCGCUGGGAUCUGGAGGUUUAAGAGCUAUGCUGGAAACAGCAUAGCAAGU | 1214 |
| | UUAAAUAAGGCUAGUCCGUUAUCAACUUGAAAAAGUGGCACCGAGUCGGUGC | |
| NR1I2 | AAUACUCCUGUCCUGAACAGUUUAAGAGCUAUGCUGGAAACAGCAUAGCAAGU | 1215 |
| | UUAAAUAAGGCUAGUCCGUUAUCAACUUGAAAAAGUGGCACCGAGUCGGUGC | |
| NR2C2 | CCGCCGCCCGCGCGCUGGUGUUUAAGAGCUAUGCUGGAAACAGCAUAGCAAGU | 1216 |
| | UUAAAUAAGGCUAGUCCGUUAUCAACUUGAAAAAGUGGCACCGAGUCGGUGC | |
| NR2F1 | GAAUGGAGUAAAAGAGACAGUUUAAGAGCUAUGCUGGAAACAGCAUAGCAAGU | 1217 |
| | UUAAAUAAGGCUAGUCCGUUAUCAACUUGAAAAAGUGGCACCGAGUCGGUGC | |
| NR5A2 | UCCGGCGAAAAGAAGGAAGGUUUAAGAGCUAUGCUGGAAACAGCAUAGCAAGU | 1218 |
| | UUAAAUAAGGCUAGUCCGUUAUCAACUUGAAAAAGUGGCACCGAGUCGGUGC | |
| OSR2 | GCCCAAGACUCCCGGCCUGGUUUAAGAGCUAUGCUGGAAACAGCAUAGCAAGU | 1219 |
| | UUAAAUAAGGCUAGUCCGUUAUCAACUUGAAAAAGUGGCACCGAGUCGGUGC | |
| OTX1 | CACUCCCGGUGCAACGUGGGUUUAAGAGCUAUGCUGGAAACAGCAUAGCAAGU | 1220 |
| | UUAAAUAAGGCUAGUCCGUUAUCAACUUGAAAAAGUGGCACCGAGUCGGUGC | |
| OVOL1 | AACAGGGAAGGAGUCGCUAGUUUAAGAGCUAUGCUGGAAACAGCAUAGCAAGU | 1221 |
| | UUAAAUAAGGCUAGUCCGUUAUCAACUUGAAAAAGUGGCACCGAGUCGGUGC | |
| PA2G4 | CCCAGGCUGAAGUCUAUGGGUUUAAGAGCUAUGCUGGAAACAGCAUAGCAAGU | 1222 |
| | UUAAAUAAGGCUAGUCCGUUAUCAACUUGAAAAAGUGGCACCGAGUCGGUGC | |
| PATZ1 | CUGUGGAGCCAGAACUGGGGUUUAAGAGCUAUGCUGGAAACAGCAUAGCAAGU | 1223 |
| | UUAAAUAAGGCUAGUCCGUUAUCAACUUGAAAAAGUGGCACCGAGUCGGUGC | |
| PAX9 | CUGUCAGAGCCGGGAAGGGGUUUAAGAGCUAUGCUGGAAACAGCAUAGCAAGU | 1224 |
| | UUAAAUAAGGCUAGUCCGUUAUCAACUUGAAAAAGUGGCACCGAGUCGGUGC | |
| PAX9 | GACACGACCGGAGCCCUGCGUUUAAGAGCUAUGCUGGAAACAGCAUAGCAAGU | 1225 |
| | UUAAAUAAGGCUAGUCCGUUAUCAACUUGAAAAAGUGGCACCGAGUCGGUGC | |
| PBX4 | UGGAGGCCAGACUGACGAGGUUUAAGAGCUAUGCUGGAAACAGCAUAGCAAGU | 1226 |
| | UUAAAUAAGGCUAGUCCGUUAUCAACUUGAAAAAGUGGCACCGAGUCGGUGC | |
| PGR | CCACAGCUGUCACUAAUCGGUUUAAGAGCUAUGCUGGAAACAGCAUAGCAAGU | 1227 |
| | UUAAAUAAGGCUAGUCCGUUAUCAACUUGAAAAAGUGGCACCGAGUCGGUGC | |
| PITX1 | AGACUCUGCCGGCGCCGUCGUUUAAGAGCUAUGCUGGAAACAGCAUAGCAAGU | 1228 |
| | UUAAAUAAGGCUAGUCCGUUAUCAACUUGAAAAAGUGGCACCGAGUCGGUGC | |
| PITX3 | CAGGAGCGCCCGAGCGGAGGUUUAAGAGCUAUGCUGGAAACAGCAUAGCAAGU | 1229 |
| | UUAAAUAAGGCUAGUCCGUUAUCAACUUGAAAAAGUGGCACCGAGUCGGUGC | |
| PITX3 | UCGGGCGCUCCUGGACUCUGUUUAAGAGCUAUGCUGGAAACAGCAUAGCAAGU | 1230 |
| | UUAAAUAAGGCUAGUCCGUUAUCAACUUGAAAAAGUGGCACCGAGUCGGUGC | |
| PITX3 | GCUGCGGCGGCGAUCUAGAGUUUAAGAGCUAUGCUGGAAACAGCAUAGCAAGU | 1231 |
| | UUAAAUAAGGCUAGUCCGUUAUCAACUUGAAAAAGUGGCACCGAGUCGGUGC | |
| POU2F2 | AUGGUUCACUCCAGCAUGGGUUUAAGAGCUAUGCUGGAAACAGCAUAGCAAGU | 1232 |
| | UUAAAUAAGGCUAGUCCGUUAUCAACUUGAAAAAGUGGCACCGAGUCGGUGC | |
| POU3F1 | GCCCGCAGACGGAGCGGAGGUUUAAGAGCUAUGCUGGAAACAGCAUAGCAAGU | 1233 |
| | UUAAAUAAGGCUAGUCCGUUAUCAACUUGAAAAAGUGGCACCGAGUCGGUGC | |
| POU3F2 | AGUCCGGCUCCGAGAGUCAGUUUAAGAGCUAUGCUGGAAACAGCAUAGCAAGU | 1234 |
| | UUAAAUAAGGCUAGUCCGUUAUCAACUUGAAAAAGUGGCACCGAGUCGGUGC | |
| POU3F3 | GCUGUUCCCCGGCAGGUAGGUUUAAGAGCUAUGCUGGAAACAGCAUAGCAAGU | 1235 |
| | UUAAAUAAGGCUAGUCCGUUAUCAACUUGAAAAAGUGGCACCGAGUCGGUGC | |
| POU5F1 | AGGCAAGUGAGCUUCGACGGUUUAAGAGCUAUGCUGGAAACAGCAUAGCAAGU | 1236 |
| | UUAAAUAAGGCUAGUCCGUUAUCAACUUGAAAAAGUGGCACCGAGUCGGUGC | |
| PRDM1 | GCCUCUCCGCAACACUGGAGUUUAAGAGCUAUGCUGGAAACAGCAUAGCAAGU | 1237 |
| | UUAAAUAAGGCUAGUCCGUUAUCAACUUGAAAAAGUGGCACCGAGUCGGUGC | |
| PRDM16 | GCCGACACCAUGCGAUCCAGUUUAAGAGCUAUGCUGGAAACAGCAUAGCAAGU | 1238 |
| | UUAAAUAAGGCUAGUCCGUUAUCAACUUGAAAAAGUGGCACCGAGUCGGUGC | |
| PRDM7 | GCGAAGCCAGACUCCCAGCGUUUAAGAGCUAUGCUGGAAACAGCAUAGCAAGU | 1239 |
| | UUAAAUAAGGCUAGUCCGUUAUCAACUUGAAAAAGUGGCACCGAGUCGGUGC | |
| PRR12 | UCCUCCUCCUCUGCGCUCAGUUUAAGAGCUAUGCUGGAAACAGCAUAGCAAGU | 1240 |
| | UUAAAUAAGGCUAGUCCGUUAUCAACUUGAAAAAGUGGCACCGAGUCGGUGC | |
| PRRX1 | GCGGCCGCUUGGACAGCCCGUUUAAGAGCUAUGCUGGAAACAGCAUAGCAAGU | 1241 |
| | UUAAAUAAGGCUAGUCCGUUAUCAACUUGAAAAAGUGGCACCGAGUCGGUGC | |
| RBCK1 | AGGCCCCAGUUCUUCGCAAGUUUAAGAGCUAUGCUGGAAACAGCAUAGCAAGU | 1242 |
| | UUAAAUAAGGCUAGUCCGUUAUCAACUUGAAAAAGUGGCACCGAGUCGGUGC | |
| RHOXF1 | GAAGAAAAGGGCCAAUAGGGUUUAAGAGCUAUGCUGGAAACAGCAUAGCAAGU | 1243 |
| | UUAAAUAAGGCUAGUCCGUUAUCAACUUGAAAAAGUGGCACCGAGUCGGUGC | |
| RUNX2 | CUGACUCUGUUGGUCUCGGGUUUAAGAGCUAUGCUGGAAACAGCAUAGCAAGU | 1244 |
| | UUAAAUAAGGCUAGUCCGUUAUCAACUUGAAAAAGUGGCACCGAGUCGGUGC | |
| SALL3 | GGAUGCGCGCGUCCGGGAGGUUUAAGAGCUAUGCUGGAAACAGCAUAGCAAGU | 1245 |
| | UUAAAUAAGGCUAGUCCGUUAUCAACUUGAAAAAGUGGCACCGAGUCGGUGC | |
| SIM1 | GUUCACUAUUAUUCCUAAUGUUUAAGAGCUAUGCUGGAAACAGCAUAGCAAGU | 1246 |
| | UUAAAUAAGGCUAGUCCGUUAUCAACUUGAAAAAGUGGCACCGAGUCGGUGC | |
| SIX1 | GGCAACUAGCAGCAUCCACGUUUAAGAGCUAUGCUGGAAACAGCAUAGCAAGU | 1247 |
| | UUAAAUAAGGCUAGUCCGUUAUCAACUUGAAAAAGUGGCACCGAGUCGGUGC | |
| SIX6 | GGGAGCGGACGACCCCGACGUUUAAGAGCUAUGCUGGAAACAGCAUAGCAAGU | 1248 |
| | UUAAAUAAGGCUAGUCCGUUAUCAACUUGAAAAAGUGGCACCGAGUCGGUGC | |
| SKI | UGGAUGUGGCGCCGGGCCCGUUUAAGAGCUAUGCUGGAAACAGCAUAGCAAGU | 1249 |
| | UUAAAUAAGGCUAGUCCGUUAUCAACUUGAAAAAGUGGCACCGAGUCGGUGC | |
| SKIL | UCGCUAGGCGGGUGUUCCAGUUUAAGAGCUAUGCUGGAAACAGCAUAGCAAGU | 1250 |
| | UUAAAUAAGGCUAGUCCGUUAUCAACUUGAAAAAGUGGCACCGAGUCGGUGC | |
| SKOR1 | CGCCAUGCGCUCCAGGCUUGUUUAAGAGCUAUGCUGGAAACAGCAUAGCAAGU | 1251 |
| | UUAAAUAAGGCUAGUCCGUUAUCAACUUGAAAAAGUGGCACCGAGUCGGUGC | |
| SMAD2 | GGACCCCCCGGAUCUGACGGUUUAAGAGCUAUGCUGGAAACAGCAUAGCAAGU | 1252 |
| | UUAAAUAAGGCUAGUCCGUUAUCAACUUGAAAAAGUGGCACCGAGUCGGUGC | |
| SMAD5 | CGCGGGCGAGGGGAACUGGGUUUAAGAGCUAUGCUGGAAACAGCAUAGCAAGU | 1253 |
| | UUAAAUAAGGCUAGUCCGUUAUCAACUUGAAAAAGUGGCACCGAGUCGGUGC | |
| SMYD3 | UACGCACCCGAGAAGGCAGGUUUAAGAGCUAUGCUGGAAACAGCAUAGCAAGU | 1254 |
| | UUAAAUAAGGCUAGUCCGUUAUCAACUUGAAAAAGUGGCACCGAGUCGGUGC | |
| SNAPC2 | GCGCCUGCCUCUUUCUGAGGUUUAAGAGCUAUGCUGGAAACAGCAUAGCAAGU | 1255 |
| | UUAAAUAAGGCUAGUCCGUUAUCAACUUGAAAAAGUGGCACCGAGUCGGUGC | |
| SOX1 | GAGCAUAGACGGCCGGGGUGUUUAAGAGCUAUGCUGGAAACAGCAUAGCAAGU | 1256 |
| | UUAAAUAAGGCUAGUCCGUUAUCAACUUGAAAAAGUGGCACCGAGUCGGUGC | |
| SOX14 | CGAGGGGAGCGCAGAACCCGUUUAAGAGCUAUGCUGGAAACAGCAUAGCAAGU | 1257 |
| | UUAAAUAAGGCUAGUCCGUUAUCAACUUGAAAAAGUGGCACCGAGUCGGUGC | |
| SOX30 | CAUCCGCCGUGGUGAGACCGUUUAAGAGCUAUGCUGGAAACAGCAUAGCAAGU | 1258 |
| | UUAAAUAAGGCUAGUCCGUUAUCAACUUGAAAAAGUGGCACCGAGUCGGUGC | |
| SOX5 | GGUCGCUUGGAAGACAUCCGUUUAAGAGCUAUGCUGGAAACAGCAUAGCAAGU | 1259 |
| | UUAAAUAAGGCUAGUCCGUUAUCAACUUGAAAAAGUGGCACCGAGUCGGUGC | |
| SOX6 | AAUGGAGAGGUGGCUUGCUGUUUAAGAGCUAUGCUGGAAACAGCAUAGCAAGU | 1260 |
| | UUAAAUAAGGCUAGUCCGUUAUCAACUUGAAAAAGUGGCACCGAGUCGGUGC | |
| SP2 | AGGAAGAUGUCGUAAUGAGGUUUAAGAGCUAUGCUGGAAACAGCAUAGCAAGU | 1261 |
| | UUAAAUAAGGCUAGUCCGUUAUCAACUUGAAAAAGUGGCACCGAGUCGGUGC | |
| SP3 | UAGCGGCCAGCAGAGCGAGGUUUAAGAGCUAUGCUGGAAACAGCAUAGCAAGU | 1262 |
| | UUAAAUAAGGCUAGUCCGUUAUCAACUUGAAAAAGUGGCACCGAGUCGGUGC | |
| SP5 | GCGCGGCGAGGGGCAAGGGGUUUAAGAGCUAUGCUGGAAACAGCAUAGCAAGU | 1263 |
| | UUAAAUAAGGCUAGUCCGUUAUCAACUUGAAAAAGUGGCACCGAGUCGGUGC | |
| SP8 | AAAAAGAUCCUCUGAGAGGGUUUAAGAGCUAUGCUGGAAACAGCAUAGCAAGU | 1264 |
| | UUAAAUAAGGCUAGUCCGUUAUCAACUUGAAAAAGUGGCACCGAGUCGGUGC | |
| SP9 | CUAUGGCCACGUCUAUACUGUUUAAGAGCUAUGCUGGAAACAGCAUAGCAAGU | 1265 |
| | UUAAAUAAGGCUAGUCCGUUAUCAACUUGAAAAAGUGGCACCGAGUCGGUGC | |
| SPIB | GAGGCUGCACAGUAAGUGAGUUUAAGAGCUAUGCUGGAAACAGCAUAGCAAGU | 1266 |
| | UUAAAUAAGGCUAGUCCGUUAUCAACUUGAAAAAGUGGCACCGAGUCGGUGC | |
| STAT5B | GCGGCGCGGCCCUGACGGGGUUUAAGAGCUAUGCUGGAAACAGCAUAGCAAGU | 1267 |
| | UUAAAUAAGGCUAGUCCGUUAUCAACUUGAAAAAGUGGCACCGAGUCGGUGC | |
| T | CCGGCGUCGGGUGUCCCCGGUUUAAGAGCUAUGCUGGAAACAGCAUAGCAAGU | 1268 |
| | UUAAAUAAGGCUAGUCCGUUAUCAACUUGAAAAAGUGGCACCGAGUCGGUGC | |
| TBPL1 | UAUUGUCGCGGGGAAGCUGGUUUAAGAGCUAUGCUGGAAACAGCAUAGCAAGU | 1269 |
| | UUAAAUAAGGCUAGUCCGUUAUCAACUUGAAAAAGUGGCACCGAGUCGGUGC | |
| TBX5 | GUACCUCCCAGCUCAAGGUGUUUAAGAGCUAUGCUGGAAACAGCAUAGCAAGU | 1270 |
| | UUAAAUAAGGCUAGUCCGUUAUCAACUUGAAAAAGUGGCACCGAGUCGGUGC | |
| TBX6 | UCGCGCCAGGGUUUCCCGAGUUUAAGAGCUAUGCUGGAAACAGCAUAGCAAGU | 1271 |
| | UUAAAUAAGGCUAGUCCGUUAUCAACUUGAAAAAGUGGCACCGAGUCGGUGC | |
| TCF12 | CCCCCCGAAUAGAACUUGUGUUUAAGAGCUAUGCUGGAAACAGCAUAGCAAGU | 1272 |
| | UUAAAUAAGGCUAGUCCGUUAUCAACUUGAAAAAGUGGCACCGAGUCGGUGC | |
| TCF23 | AGGACAAGGCAGGACCCGUGUUUAAGAGCUAUGCUGGAAACAGCAUAGCAAGU | 1273 |
| | UUAAAUAAGGCUAGUCCGUUAUCAACUUGAAAAAGUGGCACCGAGUCGGUGC | |
| TCF3 | UAGCGGGCCGGAGCCGACGGUUUAAGAGCUAUGCUGGAAACAGCAUAGCAAGU | 1274 |
| | UUAAAUAAGGCUAGUCCGUUAUCAACUUGAAAAAGUGGCACCGAGUCGGUGC | |
| TFAP2A | CCGCCGCUAAGAAAAGAGGGUUUAAGAGCUAUGCUGGAAACAGCAUAGCAAGU | 1275 |
| | UUAAAUAAGGCUAGUCCGUUAUCAACUUGAAAAAGUGGCACCGAGUCGGUGC | |
| TFAP2A | CCAGAGAGUAGCUCCACUUGUUUAAGAGCUAUGCUGGAAACAGCAUAGCAAGU | 1276 |
| | UUAAAUAAGGCUAGUCCGUUAUCAACUUGAAAAAGUGGCACCGAGUCGGUGC | |
| TFAP2E | CCAUGGAGGCAGGACGGACGUUUAAGAGCUAUGCUGGAAACAGCAUAGCAAGU | 1277 |
| | UUAAAUAAGGCUAGUCCGUUAUCAACUUGAAAAAGUGGCACCGAGUCGGUGC | |
| TFDP2 | AGUCUUUGUUACCAUUCAGGUUUAAGAGCUAUGCUGGAAACAGCAUAGCAAGU | 1278 |
| | UUAAAUAAGGCUAGUCCGUUAUCAACUUGAAAAAGUGGCACCGAGUCGGUGC | |
| TFDP3 | GGUGUGAACGGCCACGGGGGUUUAAGAGCUAUGCUGGAAACAGCAUAGCAAGU | 1279 |
| | UUAAAUAAGGCUAGUCCGUUAUCAACUUGAAAAAGUGGCACCGAGUCGGUGC | |
| TGIF2 | UCCCUGUCGGAGAGAUCGGGUUUAAGAGCUAUGCUGGAAACAGCAUAGCAAGU | 1280 |
| | UUAAAUAAGGCUAGUCCGUUAUCAACUUGAAAAAGUGGCACCGAGUCGGUGC | |
| TGIF2LX | AUAUGGAGGCCGCUGCGGAGUUUAAGAGCUAUGCUGGAAACAGCAUAGCAAGU | 1281 |
| | UUAAAUAAGGCUAGUCCGUUAUCAACUUGAAAAAGUGGCACCGAGUCGGUGC | |
| THAP6 | CAGGCUCCCCGCCACCGGAGUUUAAGAGCUAUGCUGGAAACAGCAUAGCAAGU | 1282 |
| | UUAAAUAAGGCUAGUCCGUUAUCAACUUGAAAAAGUGGCACCGAGUCGGUGC | |
| THRA | UGCUGGGGGCGUCCAUGGGGUUUAAGAGCUAUGCUGGAAACAGCAUAGCAAGU | 1283 |
| | UUAAAUAAGGCUAGUCCGUUAUCAACUUGAAAAAGUGGCACCGAGUCGGUGC | |
| TIGD1 | CGGGCGGGUCACAAGGACCGUUUAAGAGCUAUGCUGGAAACAGCAUAGCAAGU | 1284 |
| | UUAAAUAAGGCUAGUCCGUUAUCAACUUGAAAAAGUGGCACCGAGUCGGUGC | |
| TIGD3 | GGCGGCGACAGCAGAACAGGUUUAAGAGCUAUGCUGGAAACAGCAUAGCAAGU | 1285 |
| | UUAAAUAAGGCUAGUCCGUUAUCAACUUGAAAAAGUGGCACCGAGUCGGUGC | |
| TIGD5 | CCAUCGAGCGCGUCAAGGGGUUUAAGAGCUAUGCUGGAAACAGCAUAGCAAGU | 1286 |
| | UUAAAUAAGGCUAGUCCGUUAUCAACUUGAAAAAGUGGCACCGAGUCGGUGC | |
| TLX3 | CCGACGGCGCCAGCUACCUGUUUAAGAGCUAUGCUGGAAACAGCAUAGCAAGU | 1287 |
| | UUAAAUAAGGCUAGUCCGUUAUCAACUUGAAAAAGUGGCACCGAGUCGGUGC | |
| TOX | CGGAACAGAGUGAGGUGUCGUUUAAGAGCUAUGCUGGAAACAGCAUAGCAAGU | 1288 |
| | UUAAAUAAGGCUAGUCCGUUAUCAACUUGAAAAAGUGGCACCGAGUCGGUGC | |
| TOX2 | CGCGGGCGCCGAGGGGUACGUUUAAGAGCUAUGCUGGAAACAGCAUAGCAAGU | 1289 |
| | UUAAAUAAGGCUAGUCCGUUAUCAACUUGAAAAAGUGGCACCGAGUCGGUGC | |
| TRIM27 | GCUCUCGCUUAGGGGGCACGUUUAAGAGCUAUGCUGGAAACAGCAUAGCAAGU | 1290 |
| | UUAAAUAAGGCUAGUCCGUUAUCAACUUGAAAAAGUGGCACCGAGUCGGUGC | |
| TRIM27 | AGGCUCGCGGCCACGCUAGGUUUAAGAGCUAUGCUGGAAACAGCAUAGCAAGU | 1291 |
| | UUAAAUAAGGCUAGUCCGUUAUCAACUUGAAAAAGUGGCACCGAGUCGGUGC | |
| TRIM40 | AAUUUCAGAUCAUCUUCUCGUUUAAGAGCUAUGCUGGAAACAGCAUAGCAAGU | 1292 |
| | UUAAAUAAGGCUAGUCCGUUAUCAACUUGAAAAAGUGGCACCGAGUCGGUGC | |
| TRIM52 | UAGCCAGCGGCUGCAUCUGGUUUAAGAGCUAUGCUGGAAACAGCAUAGCAAGU | 1293 |
| | UUAAAUAAGGCUAGUCCGUUAUCAACUUGAAAAAGUGGCACCGAGUCGGUGC | |
| TSHZ2 | ACACACACAAGACAGGGCGGUUUAAGAGCUAUGCUGGAAACAGCAUAGCAAGU | 1294 |
| | UUAAAUAAGGCUAGUCCGUUAUCAACUUGAAAAAGUGGCACCGAGUCGGUGC | |
| VAX1 | UGUCCCCAGCCUGGCGAUCGUUUAAGAGCUAUGCUGGAAACAGCAUAGCAAGU | 1295 |
| | UUAAAUAAGGCUAGUCCGUUAUCAACUUGAAAAAGUGGCACCGAGUCGGUGC | |
| VEGFA | CCGGGUAGCUCGGAGGUCGGUUUAAGAGCUAUGCUGGAAACAGCAUAGCAAGU | 1296 |
| | UUAAAUAAGGCUAGUCCGUUAUCAACUUGAAAAAGUGGCACCGAGUCGGUGC | |
| VSX1 | AUAGCAUGGGAUCAUGCUCGUUUAAGAGCUAUGCUGGAAACAGCAUAGCAAGU | 1297 |
| | UUAAAUAAGGCUAGUCCGUUAUCAACUUGAAAAAGUGGCACCGAGUCGGUGC | |
| VSX1 | CAGCGUGAUGGCCGAGUACGUUUAAGAGCUAUGCUGGAAACAGCAUAGCAAGU | 1298 |
| | UUAAAUAAGGCUAGUCCGUUAUCAACUUGAAAAAGUGGCACCGAGUCGGUGC | |
| WNT1 | GCUCGCGGUCCCGGCUGGUGUUUAAGAGCUAUGCUGGAAACAGCAUAGCAAGU | 1299 |
| | UUAAAUAAGGCUAGUCCGUUAUCAACUUGAAAAAGUGGCACCGAGUCGGUGC | |
| WNT3A | GCUCACUCACCACCAGAUCGUUUAAGAGCUAUGCUGGAAACAGCAUAGCAAGU | 1300 |
| | UUAAAUAAGGCUAGUCCGUUAUCAACUUGAAAAAGUGGCACCGAGUCGGUGC | |
| YBX1 | UCGAACUAGCGAGAAUGGCGUUUAAGAGCUAUGCUGGAAACAGCAUAGCAAGU | 1301 |
| | UUAAAUAAGGCUAGUCCGUUAUCAACUUGAAAAAGUGGCACCGAGUCGGUGC | |
| YY1 | GCGGCUGCAGAGCGAUCAUGUUUAAGAGCUAUGCUGGAAACAGCAUAGCAAGU | 1302 |
| | UUAAAUAAGGCUAGUCCGUUAUCAACUUGAAAAAGUGGCACCGAGUCGGUGC | |
| YY2 | AGAGAAAGGCGCGAGACUGGUUUAAGAGCUAUGCUGGAAACAGCAUAGCAAGU | 1303 |
| | UUAAAUAAGGCUAGUCCGUUAUCAACUUGAAAAAGUGGCACCGAGUCGGUGC | |
| YY2 | AGGAAGGGGCGAGCUGCAGGUUUAAGAGCUAUGCUGGAAACAGCAUAGCAAGU | 1304 |
| | UUAAAUAAGGCUAGUCCGUUAUCAACUUGAAAAAGUGGCACCGAGUCGGUGC | |
| ZBED5 | CAGCUCAGGGAUAUCGCCUGUUUAAGAGCUAUGCUGGAAACAGCAUAGCAAGU | 1305 |
| | UUAAAUAAGGCUAGUCCGUUAUCAACUUGAAAAAGUGGCACCGAGUCGGUGC | |
| ZBED5 | AUCUCUAUGGAGAUGGCCUGUUUAAGAGCUAUGCUGGAAACAGCAUAGCAAGU | 1306 |
| | UUAAAUAAGGCUAGUCCGUUAUCAACUUGAAAAAGUGGCACCGAGUCGGUGC | |
| ZBTB2 | GUGUGGAGGAGGCGCCUCUGUUUAAGAGCUAUGCUGGAAACAGCAUAGCAAGU | 1307 |
| | UUAAAUAAGGCUAGUCCGUUAUCAACUUGAAAAAGUGGCACCGAGUCGGUGC | |
| ZBTB21 | GAUGGAAUCACAGCGGCAGGUUUAAGAGCUAUGCUGGAAACAGCAUAGCAAGU | 1308 |
| | UUAAAUAAGGCUAGUCCGUUAUCAACUUGAAAAAGUGGCACCGAGUCGGUGC | |
| ZBTB38 | CACGGGUCCGGAAGCACCAGUUUAAGAGCUAUGCUGGAAACAGCAUAGCAAGU | 1309 |
| | UUAAAUAAGGCUAGUCCGUUAUCAACUUGAAAAAGUGGCACCGAGUCGGUGC | |
| ZBTB4 | CGCCUGCGCAGGCCCGCAAGUUUAAGAGCUAUGCUGGAAACAGCAUAGCAAGU | 1310 |
| | UUAAAUAAGGCUAGUCCGUUAUCAACUUGAAAAAGUGGCACCGAGUCGGUGC | |
| ZBTB40 | CGCCGGAGACGCCAGAAGGGUUUAAGAGCUAUGCUGGAAACAGCAUAGCAAGU | 1311 |
| | UUAAAUAAGGCUAGUCCGUUAUCAACUUGAAAAAGUGGCACCGAGUCGGUGC | |
| ZBTB42 | GCCGGGAAGGGCGCUUCGUGUUUAAGAGCUAUGCUGGAAACAGCAUAGCAAGU | 1312 |
| | UUAAAUAAGGCUAGUCCGUUAUCAACUUGAAAAAGUGGCACCGAGUCGGUGC | |
| ZBTB49 | UCUGUGCCGGGCAUCACAGGUUUAAGAGCUAUGCUGGAAACAGCAUAGCAAGU | 1313 |
| | UUAAAUAAGGCUAGUCCGUUAUCAACUUGAAAAAGUGGCACCGAGUCGGUGC | |
| ZBTB7B | GCGGCCUUCUGACCAGGACGUUUAAGAGCUAUGCUGGAAACAGCAUAGCAAGU | 1314 |
| | UUAAAUAAGGCUAGUCCGUUAUCAACUUGAAAAAGUGGCACCGAGUCGGUGC | |
| ZBTB7B | AGCAGGGCCCCAAGCCCCCGUUUAAGAGCUAUGCUGGAAACAGCAUAGCAAGU | 1315 |
| | UUAAAUAAGGCUAGUCCGUUAUCAACUUGAAAAAGUGGCACCGAGUCGGUGC | |
| ZBTB7C | CGCCACGAGACUCUGACAGGUUUAAGAGCUAUGCUGGAAACAGCAUAGCAAGU | 1316 |
| | UUAAAUAAGGCUAGUCCGUUAUCAACUUGAAAAAGUGGCACCGAGUCGGUGC | |
| ZBTB8B | GUCGGUGCGCGGUGCUCCGGUUUAAGAGCUAUGCUGGAAACAGCAUAGCAAGU | 1317 |
| | UUAAAUAAGGCUAGUCCGUUAUCAACUUGAAAAAGUGGCACCGAGUCGGUGC | |
| ZBTB9 | GUCGGCGGGAAGGACAAUCGUUUAAGAGCUAUGCUGGAAACAGCAUAGCAAGU | 1318 |
| | UUAAAUAAGGCUAGUCCGUUAUCAACUUGAAAAAGUGGCACCGAGUCGGUGC | |
| ZC3H8 | ACCCGAGAGAGUGACAACCGUUUAAGAGCUAUGCUGGAAACAGCAUAGCAAGU | 1319 |
| | UUAAAUAAGGCUAGUCCGUUAUCAACUUGAAAAAGUGGCACCGAGUCGGUGC | |
| ZEB2 | CCUCGCCAAGAGUGUCGGGGUUUAAGAGCUAUGCUGGAAACAGCAUAGCAAGU | 1320 |
| | UUAAAUAAGGCUAGUCCGUUAUCAACUUGAAAAAGUGGCACCGAGUCGGUGC | |
| ZFHX2 | CUCUACCUAAAGCUGAACUGUUUAAGAGCUAUGCUGGAAACAGCAUAGCAAGU | 1321 |
| | UUAAAUAAGGCUAGUCCGUUAUCAACUUGAAAAAGUGGCACCGAGUCGGUGC | |
| ZFHX3 | UGCCGCCGAGCAGCAUGGUGUUUAAGAGCUAUGCUGGAAACAGCAUAGCAAGU | 1322 |
| | UUAAAUAAGGCUAGUCCGUUAUCAACUUGAAAAAGUGGCACCGAGUCGGUGC | |
| ZFP28 | GCCUCGGGUGACAUGCGGGGUUUAAGAGCUAUGCUGGAAACAGCAUAGCAAGU | 1323 |
| | UUAAAUAAGGCUAGUCCGUUAUCAACUUGAAAAAGUGGCACCGAGUCGGUGC | |
| ZFP41 | CCGGUGCCUAGGGCCGACGGUUUAAGAGCUAUGCUGGAAACAGCAUAGCAAGU | 1324 |
| | UUAAAUAAGGCUAGUCCGUUAUCAACUUGAAAAAGUGGCACCGAGUCGGUGC | |
| ZFP69B | CUGCAGCGGUGGGAAGGCGGUUUAAGAGCUAUGCUGGAAACAGCAUAGCAAGU | 1325 |
| | UUAAAUAAGGCUAGUCCGUUAUCAACUUGAAAAAGUGGCACCGAGUCGGUGC | |
| ZFP90 | GCAAGGCGCGAAACCCACCGUUUAAGAGCUAUGCUGGAAACAGCAUAGCAAGU | 1326 |
| | UUAAAUAAGGCUAGUCCGUUAUCAACUUGAAAAAGUGGCACCGAGUCGGUGC | |
| ZGLP1 | UAAAGGCCCCACCUAGCUCGUUUAAGAGCUAUGCUGGAAACAGCAUAGCAAGU | 1327 |
| | UUAAAUAAGGCUAGUCCGUUAUCAACUUGAAAAAGUGGCACCGAGUCGGUGC | |
| ZHX3 | GGAGCCGCGGACUGCUGAGGUUUAAGAGCUAUGCUGGAAACAGCAUAGCAAGU | 1328 |
| | UUAAAUAAGGCUAGUCCGUUAUCAACUUGAAAAAGUGGCACCGAGUCGGUGC | |
| ZIC5 | GCUACACCACCACCAACAGGUUUAAGAGCUAUGCUGGAAACAGCAUAGCAAGU | 1329 |
| | UUAAAUAAGGCUAGUCCGUUAUCAACUUGAAAAAGUGGCACCGAGUCGGUGC | |
| ZKSCAN1 | GAGGGCCUAAGUCCGUGUGGUUUAAGAGCUAUGCUGGAAACAGCAUAGCAAGU | 1330 |
| | UUAAAUAAGGCUAGUCCGUUAUCAACUUGAAAAAGUGGCACCGAGUCGGUGC | |
| ZKSCAN1 | GGCCGAAGGGCACCGCACAGUUUAAGAGCUAUGCUGGAAACAGCAUAGCAAGU | 1331 |
| | UUAAAUAAGGCUAGUCCGUUAUCAACUUGAAAAAGUGGCACCGAGUCGGUGC | |
| ZKSCAN2 | CAGGGCUCGCAGGGGGCAGGUUUAAGAGCUAUGCUGGAAACAGCAUAGCAAGU | 1332 |
| | UUAAAUAAGGCUAGUCCGUUAUCAACUUGAAAAAGUGGCACCGAGUCGGUGC | |
| ZKSCAN7 | CCGCGUCUCGGCCCACUCGGUUUAAGAGCUAUGCUGGAAACAGCAUAGCAAGU | 1333 |
| | UUAAAUAAGGCUAGUCCGUUAUCAACUUGAAAAAGUGGCACCGAGUCGGUGC | |
| ZNF107 | AGCCACAGCCACUUCCGAUGUUUAAGAGCUAUGCUGGAAACAGCAUAGCAAGU | 1334 |
| | UUAAAUAAGGCUAGUCCGUUAUCAACUUGAAAAAGUGGCACCGAGUCGGUGC | |
| ZNF121 | UCCCAGUCAGGAGCCAGGUGUUUAAGAGCUAUGCUGGAAACAGCAUAGCAAGU | 1335 |
| | UUAAAUAAGGCUAGUCCGUUAUCAACUUGAAAAAGUGGCACCGAGUCGGUGC | |
| ZNF132 | AGCAAAAUGAGGACCGCAAGUUUAAGAGCUAUGCUGGAAACAGCAUAGCAAGU | 1336 |
| | UUAAAUAAGGCUAGUCCGUUAUCAACUUGAAAAAGUGGCACCGAGUCGGUGC | |
| ZNF135 | CUUUGUCUCGCAGUCAGGAGUUUAAGAGCUAUGCUGGAAACAGCAUAGCAAGU | 1337 |
| | UUAAAUAAGGCUAGUCCGUUAUCAACUUGAAAAAGUGGCACCGAGUCGGUGC | |
| ZNF135 | AGGGUGAGCUAGGCCGGCGGUUUAAGAGCUAUGCUGGAAACAGCAUAGCAAGU | 1338 |
| | UUAAAUAAGGCUAGUCCGUUAUCAACUUGAAAAAGUGGCACCGAGUCGGUGC | |
| ZNF140 | CGUUGCCUACAGCCAACACGUUUAAGAGCUAUGCUGGAAACAGCAUAGCAAGU | 1339 |
| | UUAAAUAAGGCUAGUCCGUUAUCAACUUGAAAAAGUGGCACCGAGUCGGUGC | |
| ZNF141 | AGCUGUGGCCGAAUCACCAGUUUAAGAGCUAUGCUGGAAACAGCAUAGCAAGU | 1340 |
| | UUAAAUAAGGCUAGUCCGUUAUCAACUUGAAAAAGUGGCACCGAGUCGGUGC | |
| ZNF222 | GGUUGCGAGCCCCAAGGAAGUUUAAGAGCUAUGCUGGAAACAGCAUAGCAAGU | 1341 |
| | UUAAAUAAGGCUAGUCCGUUAUCAACUUGAAAAAGUGGCACCGAGUCGGUGC | |
| ZNF225 | CAACCUCACAGUAACGGAGGUUUAAGAGCUAUGCUGGAAACAGCAUAGCAAGU | 1342 |
| | UUAAAUAAGGCUAGUCCGUUAUCAACUUGAAAAAGUGGCACCGAGUCGGUGC | |
| ZNF229 | AGGCCAUGGGAAUUAGGAUGUUUAAGAGCUAUGCUGGAAACAGCAUAGCAAGU | 1343 |
| | UUAAAUAAGGCUAGUCCGUUAUCAACUUGAAAAAGUGGCACCGAGUCGGUGC | |
| ZNF230 | UCGUUGCGACCCCAAGCGAGUUUAAGAGCUAUGCUGGAAACAGCAUAGCAAGU | 1344 |
| | UUAAAUAAGGCUAGUCCGUUAUCAACUUGAAAAAGUGGCACCGAGUCGGUGC | |
| ZNF248 | UGCAGGAGCCGUCUCCCUCGUUUAAGAGCUAUGCUGGAAACAGCAUAGCAAGU | 1345 |
| | UUAAAUAAGGCUAGUCCGUUAUCAACUUGAAAAAGUGGCACCGAGUCGGUGC | |
| ZNF25 | ACCAGGCGGCUCCCACCCAGUUUAAGAGCUAUGCUGGAAACAGCAUAGCAAGU | 1346 |
| | UUAAAUAAGGCUAGUCCGUUAUCAACUUGAAAAAGUGGCACCGAGUCGGUGC | |
| ZNF26 | ACACCCGCUGGCCAGAUUCGUUUAAGAGCUAUGCUGGAAACAGCAUAGCAAGU | 1347 |
| | UUAAAUAAGGCUAGUCCGUUAUCAACUUGAAAAAGUGGCACCGAGUCGGUGC | |
| ZNF267 | UACAUCACCUCAAAUAAAAGUUUAAGAGCUAUGCUGGAAACAGCAUAGCAAGU | 1348 |
| | UUAAAUAAGGCUAGUCCGUUAUCAACUUGAAAAAGUGGCACCGAGUCGGUGC | |
| ZNF280C | UGGGGUUCGGAUAAGGAGGGUUUAAGAGCUAUGCUGGAAACAGCAUAGCAAGU | 1349 |
| | UUAAAUAAGGCUAGUCCGUUAUCAACUUGAAAAAGUGGCACCGAGUCGGUGC | |
| ZNF281 | GACCCGUAAGUAUUGCCGGGUUUAAGAGCUAUGCUGGAAACAGCAUAGCAAGU | 1350 |
| | UUAAAUAAGGCUAGUCCGUUAUCAACUUGAAAAAGUGGCACCGAGUCGGUGC | |
| ZNF283 | ACCUUAAGGACACCGGAAAGUUUAAGAGCUAUGCUGGAAACAGCAUAGCAAGU | 1351 |
| | UUAAAUAAGGCUAGUCCGUUAUCAACUUGAAAAAGUGGCACCGAGUCGGUGC | |
| ZNF286B | GUGCUGCUCUCAUUCCGCCGUUUAAGAGCUAUGCUGGAAACAGCAUAGCAAGU | 1352 |
| | UUAAAUAAGGCUAGUCCGUUAUCAACUUGAAAAAGUGGCACCGAGUCGGUGC | |
| ZNF304 | CAACCAGAAUGCACGGACCGUUUAAGAGCUAUGCUGGAAACAGCAUAGCAAGU | 1353 |
| | UUAAAUAAGGCUAGUCCGUUAUCAACUUGAAAAAGUGGCACCGAGUCGGUGC | |
| ZNF317 | AUCGGGGGAGCGGAGGUGAGUUUAAGAGCUAUGCUGGAAACAGCAUAGCAAGU | 1354 |
| | UUAAAUAAGGCUAGUCCGUUAUCAACUUGAAAAAGUGGCACCGAGUCGGUGC | |
| ZNF317 | GACACGAGGGGUCCCCAACGUUUAAGAGCUAUGCUGGAAACAGCAUAGCAAGU | 1355 |
| | UUAAAUAAGGCUAGUCCGUUAUCAACUUGAAAAAGUGGCACCGAGUCGGUGC | |
| ZNF318 | CACGGCGACAGCUCUGACCGUUUAAGAGCUAUGCUGGAAACAGCAUAGCAAGU | 1356 |
| | UUAAAUAAGGCUAGUCCGUUAUCAACUUGAAAAAGUGGCACCGAGUCGGUGC | |
| ZNF320 | AGCCGCCGAGAGCGACGGUGUUUAAGAGCUAUGCUGGAAACAGCAUAGCAAGU | 1357 |
| | UUAAAUAAGGCUAGUCCGUUAUCAACUUGAAAAAGUGGCACCGAGUCGGUGC | |
| ZNF33B | AGGAACUGGCGUAGCGUCCGUUUAAGAGCUAUGCUGGAAACAGCAUAGCAAGU | 1358 |
| | UUAAAUAAGGCUAGUCCGUUAUCAACUUGAAAAAGUGGCACCGAGUCGGUGC | |
| ZNF346 | CAGGCCGCGGACGGCGGAGGUUUAAGAGCUAUGCUGGAAACAGCAUAGCAAGU | 1359 |
| | UUAAAUAAGGCUAGUCCGUUAUCAACUUGAAAAAGUGGCACCGAGUCGGUGC | |
| ZNF358 | CGCUCCCGGGGAGCGAGAGGUUUAAGAGCUAUGCUGGAAACAGCAUAGCAAGU | 1360 |
| | UUAAAUAAGGCUAGUCCGUUAUCAACUUGAAAAAGUGGCACCGAGUCGGUGC | |
| ZNF367 | UGUAACGCGGGAAAAGCCGGUUUAAGAGCUAUGCUGGAAACAGCAUAGCAAGU | 1361 |
| | UUAAAUAAGGCUAGUCCGUUAUCAACUUGAAAAAGUGGCACCGAGUCGGUGC | |
| ZNF382 | CACGGACGCAGCCACAGAAGUUUAAGAGCUAUGCUGGAAACAGCAUAGCAAGU | 1362 |
| | UUAAAUAAGGCUAGUCCGUUAUCAACUUGAAAAAGUGGCACCGAGUCGGUGC | |
| ZNF383 | CAAGGGUAGGGGAAGUGCGGUUUAAGAGCUAUGCUGGAAACAGCAUAGCAAGU | 1363 |
| | UUAAAUAAGGCUAGUCCGUUAUCAACUUGAAAAAGUGGCACCGAGUCGGUGC | |
| ZNF385B | CGGCGCGCGAGAGUGGCGUGUUUAAGAGCUAUGCUGGAAACAGCAUAGCAAGU | 1364 |
| | UUAAAUAAGGCUAGUCCGUUAUCAACUUGAAAAAGUGGCACCGAGUCGGUGC | |
| ZNF385B | GCCCGGCGCGGGCAAGAGUGUUUAAGAGCUAUGCUGGAAACAGCAUAGCAAGU | 1365 |
| | UUAAAUAAGGCUAGUCCGUUAUCAACUUGAAAAAGUGGCACCGAGUCGGUGC | |
| ZNF391 | CCCGCCCGGGGUGUGUCGGGUUUAAGAGCUAUGCUGGAAACAGCAUAGCAAGU | 1366 |
| | UUAAAUAAGGCUAGUCCGUUAUCAACUUGAAAAAGUGGCACCGAGUCGGUGC | |
| ZNF415 | AACGGAUCGCGUUGGGUGAGUUUAAGAGCUAUGCUGGAAACAGCAUAGCAAGU | 1367 |
| | UUAAAUAAGGCUAGUCCGUUAUCAACUUGAAAAAGUGGCACCGAGUCGGUGC | |
| ZNF423 | CCUUGCCUGGGGAGGAUGAGUUUAAGAGCUAUGCUGGAAACAGCAUAGCAAGU | 1368 |
| | UUAAAUAAGGCUAGUCCGUUAUCAACUUGAAAAAGUGGCACCGAGUCGGUGC | |
| ZNF43 | CUCCGGCACGCGCAGAUUGGUUUAAGAGCUAUGCUGGAAACAGCAUAGCAAGU | 1369 |
| | UUAAAUAAGGCUAGUCCGUUAUCAACUUGAAAAAGUGGCACCGAGUCGGUGC | |
| ZNF43 | CAGCUCUGCAGCCGCAACGGUUUAAGAGCUAUGCUGGAAACAGCAUAGCAAGU | 1370 |
| | UUAAAUAAGGCUAGUCCGUUAUCAACUUGAAAAAGUGGCACCGAGUCGGUGC | |
| ZNF432 | CAGGGCGUGGAAACGUGGUGUUUAAGAGCUAUGCUGGAAACAGCAUAGCAAGU | 1371 |
| | UUAAAUAAGGCUAGUCCGUUAUCAACUUGAAAAAGUGGCACCGAGUCGGUGC | |
| ZNF433 | CAGGCGGCGAGCUGAGGUUGUUUAAGAGCUAUGCUGGAAACAGCAUAGCAAGU | 1372 |
| | UUAAAUAAGGCUAGUCCGUUAUCAACUUGAAAAAGUGGCACCGAGUCGGUGC | |
| ZNF436 | UCAGAAACCACAGGCUCAUGUUUAAGAGCUAUGCUGGAAACAGCAUAGCAAGU | 1373 |
| | UUAAAUAAGGCUAGUCCGUUAUCAACUUGAAAAAGUGGCACCGAGUCGGUGC | |
| ZNF441 | AAUCAGGCGCACUGACCGGGUUUAAGAGCUAUGCUGGAAACAGCAUAGCAAGU | 1374 |
| | UUAAAUAAGGCUAGUCCGUUAUCAACUUGAAAAAGUGGCACCGAGUCGGUGC | |
| ZNF441 | CGUGCGGCCGAGGGAACCGGUUUAAGAGCUAUGCUGGAAACAGCAUAGCAAGU | 1375 |
| | UUAAAUAAGGCUAGUCCGUUAUCAACUUGAAAAAGUGGCACCGAGUCGGUGC | |
| ZNF443 | GGAGCUGUCGGUAGGACCUGUUUAAGAGCUAUGCUGGAAACAGCAUAGCAAGU | 1376 |
| | UUAAAUAAGGCUAGUCCGUUAUCAACUUGAAAAAGUGGCACCGAGUCGGUGC | |
| ZNF461 | AGGAAUGGUCUCCGGGUAGGUUUAAGAGCUAUGCUGGAAACAGCAUAGCAAGU | 1377 |
| | UUAAAUAAGGCUAGUCCGUUAUCAACUUGAAAAAGUGGCACCGAGUCGGUGC | |
| ZNF462 | UGCCGGGUCUCAGCAAUGGGUUUAAGAGCUAUGCUGGAAACAGCAUAGCAAGU | 1378 |
| | UUAAAUAAGGCUAGUCCGUUAUCAACUUGAAAAAGUGGCACCGAGUCGGUGC | |
| ZNF468 | AAACGUAUACAUUGCCCUAGUUUAAGAGCUAUGCUGGAAACAGCAUAGCAAGU | 1379 |
| | UUAAAUAAGGCUAGUCCGUUAUCAACUUGAAAAAGUGGCACCGAGUCGGUGC | |
| ZNF473 | CUGCGAGGAGGCGCGUGUGGUUUAAGAGCUAUGCUGGAAACAGCAUAGCAAGU | 1380 |
| | UUAAAUAAGGCUAGUCCGUUAUCAACUUGAAAAAGUGGCACCGAGUCGGUGC | |
| ZNF483 | CGGAUGCUGAUGCAGGUACGUUUAAGAGCUAUGCUGGAAACAGCAUAGCAAGU | 1381 |
| | UUAAAUAAGGCUAGUCCGUUAUCAACUUGAAAAAGUGGCACCGAGUCGGUGC | |
| ZNF486 | UCGCUGCAUCUGGAGCUCUGUUUAAGAGCUAUGCUGGAAACAGCAUAGCAAGU | 1382 |
| | UUAAAUAAGGCUAGUCCGUUAUCAACUUGAAAAAGUGGCACCGAGUCGGUGC | |
| ZNF491 | GACUGGAUGCAGAACGCAAGUUUAAGAGCUAUGCUGGAAACAGCAUAGCAAGU | 1383 |
| | UUAAAUAAGGCUAGUCCGUUAUCAACUUGAAAAAGUGGCACCGAGUCGGUGC | |
| ZNF507 | UGGAGCUCCGGAUGAGGAGGUUUAAGAGCUAUGCUGGAAACAGCAUAGCAAGU | 1384 |
| | UUAAAUAAGGCUAGUCCGUUAUCAACUUGAAAAAGUGGCACCGAGUCGGUGC | |
| ZNF514 | AGAGGCAGGCAGUACUUCAGUUUAAGAGCUAUGCUGGAAACAGCAUAGCAAGU | 1385 |
| | UUAAAUAAGGCUAGUCCGUUAUCAACUUGAAAAAGUGGCACCGAGUCGGUGC | |
| ZNF519 | CACAGAGCGACGGAGUGAGGUUUAAGAGCUAUGCUGGAAACAGCAUAGCAAGU | 1386 |
| | UUAAAUAAGGCUAGUCCGUUAUCAACUUGAAAAAGUGGCACCGAGUCGGUGC | |
| ZNF519 | CAGCCAGAGCGCGGGGUUAGUUUAAGAGCUAUGCUGGAAACAGCAUAGCAAGU | 1387 |
| | UUAAAUAAGGCUAGUCCGUUAUCAACUUGAAAAAGUGGCACCGAGUCGGUGC | |
| ZNF540 | ACGGGCCCUAGCGGCUUGGGUUUAAGAGCUAUGCUGGAAACAGCAUAGCAAGU | 1388 |
| | UUAAAUAAGGCUAGUCCGUUAUCAACUUGAAAAAGUGGCACCGAGUCGGUGC | |
| ZNF543 | GCUGGACGCGCCUACCCAGGUUUAAGAGCUAUGCUGGAAACAGCAUAGCAAGU | 1389 |
| | UUAAAUAAGGCUAGUCCGUUAUCAACUUGAAAAAGUGGCACCGAGUCGGUGC | |
| ZNF546 | GCAAUGUAAAGGGCCCUUGGUUUAAGAGCUAUGCUGGAAACAGCAUAGCAAGU | 1390 |
| | UUAAAUAAGGCUAGUCCGUUAUCAACUUGAAAAAGUGGCACCGAGUCGGUGC | |
| ZNF549 | GCCGGAAACGCCCAGCCCGGUUUAAGAGCUAUGCUGGAAACAGCAUAGCAAGU | 1391 |
| | UUAAAUAAGGCUAGUCCGUUAUCAACUUGAAAAAGUGGCACCGAGUCGGUGC | |
| ZNF555 | GCCAGGGACCGCUAGGGGCGUUUAAGAGCUAUGCUGGAAACAGCAUAGCAAGU | 1392 |
| | UUAAAUAAGGCUAGUCCGUUAUCAACUUGAAAAAGUGGCACCGAGUCGGUGC | |
| ZNF562 | CACCACAAUAAAGGUUAAAGUUUAAGAGCUAUGCUGGAAACAGCAUAGCAAGU | 1393 |
| | UUAAAUAAGGCUAGUCCGUUAUCAACUUGAAAAAGUGGCACCGAGUCGGUGC | |
| ZNF567 | CGGCCGGCAACCGAAGGUGGUUUAAGAGCUAUGCUGGAAACAGCAUAGCAAGU | 1394 |
| | UUAAAUAAGGCUAGUCCGUUAUCAACUUGAAAAAGUGGCACCGAGUCGGUGC | |
| ZNF569 | GUCUCGGUCCGUUACACCAGUUUAAGAGCUAUGCUGGAAACAGCAUAGCAAGU | 1395 |
| | UUAAAUAAGGCUAGUCCGUUAUCAACUUGAAAAAGUGGCACCGAGUCGGUGC | |
| ZNF574 | ACUGAGGUAGUGACUGAGGGUUUAAGAGCUAUGCUGGAAACAGCAUAGCAAGU | 1396 |
| | UUAAAUAAGGCUAGUCCGUUAUCAACUUGAAAAAGUGGCACCGAGUCGGUGC | |
| ZNF577 | GCAGUGUGUGGGGUUCGCGGUUUAAGAGCUAUGCUGGAAACAGCAUAGCAAGU | 1397 |
| | UUAAAUAAGGCUAGUCCGUUAUCAACUUGAAAAAGUGGCACCGAGUCGGUGC | |
| ZNF596 | CCGCAGGAAGGGAACUGCGGUUUAAGAGCUAUGCUGGAAACAGCAUAGCAAGU | 1398 |
| | UUAAAUAAGGCUAGUCCGUUAUCAACUUGAAAAAGUGGCACCGAGUCGGUGC | |
| ZNF610 | AAGCGCGGGGCAGGACGUUGUUUAAGAGCUAUGCUGGAAACAGCAUAGCAAGU | 1399 |
| | UUAAAUAAGGCUAGUCCGUUAUCAACUUGAAAAAGUGGCACCGAGUCGGUGC | |
| ZNF616 | CCCCUCCAGGCGUCGACAAGUUUAAGAGCUAUGCUGGAAACAGCAUAGCAAGU | 1400 |
| | UUAAAUAAGGCUAGUCCGUUAUCAACUUGAAAAAGUGGCACCGAGUCGGUGC | |
| ZNF621 | CACGGUCCGGGUGAAGGAGGUUUAAGAGCUAUGCUGGAAACAGCAUAGCAAGU | 1401 |
| | UUAAAUAAGGCUAGUCCGUUAUCAACUUGAAAAAGUGGCACCGAGUCGGUGC | |
| ZNF626 | UGGGAGAGACGCCACGCUGGUUUAAGAGCUAUGCUGGAAACAGCAUAGCAAGU | 1402 |
| | UUAAAUAAGGCUAGUCCGUUAUCAACUUGAAAAAGUGGCACCGAGUCGGUGC | |
| ZNF627 | ACGCGAGCCCGGGUGGGGAGUUUAAGAGCUAUGCUGGAAACAGCAUAGCAAGU | 1403 |
| | UUAAAUAAGGCUAGUCCGUUAUCAACUUGAAAAAGUGGCACCGAGUCGGUGC | |
| ZNF629 | CUUCUCAAGGGGUGAUUCCGUUUAAGAGCUAUGCUGGAAACAGCAUAGCAAGU | 1404 |
| | UUAAAUAAGGCUAGUCCGUUAUCAACUUGAAAAAGUGGCACCGAGUCGGUGC | |
| ZNF630 | CACUCACCCGGACAAGUCGGUUUAAGAGCUAUGCUGGAAACAGCAUAGCAAGU | 1405 |
| | UUAAAUAAGGCUAGUCCGUUAUCAACUUGAAAAAGUGGCACCGAGUCGGUGC | |
| ZNF630 | AUCCUACGAAAGCAGUGUGGUUUAAGAGCUAUGCUGGAAACAGCAUAGCAAGU | 1406 |
| | UUAAAUAAGGCUAGUCCGUUAUCAACUUGAAAAAGUGGCACCGAGUCGGUGC | |
| ZNF641 | CGGCGGAGCCAGCGACAGGGUUUAAGAGCUAUGCUGGAAACAGCAUAGCAAGU | 1407 |
| | UUAAAUAAGGCUAGUCCGUUAUCAACUUGAAAAAGUGGCACCGAGUCGGUGC | |
| ZNF645 | CACAUUCUUGUUCACCAGCGUUUAAGAGCUAUGCUGGAAACAGCAUAGCAAGU | 1408 |
| | UUAAAUAAGGCUAGUCCGUUAUCAACUUGAAAAAGUGGCACCGAGUCGGUGC | |
| ZNF658 | ACCAAAGAGGUCGUUGUGAGUUUAAGAGCUAUGCUGGAAACAGCAUAGCAAGU | 1409 |
| | UUAAAUAAGGCUAGUCCGUUAUCAACUUGAAAAAGUGGCACCGAGUCGGUGC | |
| ZNF660 | GCUACGAGGAGUCAGAGACGUUUAAGAGCUAUGCUGGAAACAGCAUAGCAAGU | 1410 |
| | UUAAAUAAGGCUAGUCCGUUAUCAACUUGAAAAAGUGGCACCGAGUCGGUGC | |
| ZNF662 | UGGAGUCGGGGUCUUACUCGUUUAAGAGCUAUGCUGGAAACAGCAUAGCAAGU | 1411 |
| | UUAAAUAAGGCUAGUCCGUUAUCAACUUGAAAAAGUGGCACCGAGUCGGUGC | |
| ZNF677 | GCGAGAUCCGCUUCCGGGUGUUUAAGAGCUAUGCUGGAAACAGCAUAGCAAGU | 1412 |
| | UUAAAUAAGGCUAGUCCGUUAUCAACUUGAAAAAGUGGCACCGAGUCGGUGC | |
| ZNF682 | GACUCCAGUCCGCAGACUCGUUUAAGAGCUAUGCUGGAAACAGCAUAGCAAGU | 1413 |
| | UUAAAUAAGGCUAGUCCGUUAUCAACUUGAAAAAGUGGCACCGAGUCGGUGC | |
| ZNF697 | GCCCCAGGGGAGCGGACAAGUUUAAGAGCUAUGCUGGAAACAGCAUAGCAAGU | 1414 |
| | UUAAAUAAGGCUAGUCCGUUAUCAACUUGAAAAAGUGGCACCGAGUCGGUGC | |
| ZNF703 | UGCUAGCCGGGGCCAGCGGGUUUAAGAGCUAUGCUGGAAACAGCAUAGCAAGU | 1415 |
| | UUAAAUAAGGCUAGUCCGUUAUCAACUUGAAAAAGUGGCACCGAGUCGGUGC | |
| ZNF705A | UGAGUAUAUUCAGGAGGAUGUUUAAGAGCUAUGCUGGAAACAGCAUAGCAAGU | 1416 |
| | UUAAAUAAGGCUAGUCCGUUAUCAACUUGAAAAAGUGGCACCGAGUCGGUGC | |
| ZNF705B | UAGCCCCAGUUGGCCCUACGUUUAAGAGCUAUGCUGGAAACAGCAUAGCAAGU | 1417 |
| | UUAAAUAAGGCUAGUCCGUUAUCAACUUGAAAAAGUGGCACCGAGUCGGUGC | |
| ZNF705G | UUGGAACACCCAGGCAGGGGUUUAAGAGCUAUGCUGGAAACAGCAUAGCAAGU | 1418 |
| | UUAAAUAAGGCUAGUCCGUUAUCAACUUGAAAAAGUGGCACCGAGUCGGUGC | |
| ZNF716 | GGACGCUUCCGUAAGGUUAGUUUAAGAGCUAUGCUGGAAACAGCAUAGCAAGU | 1419 |
| | UUAAAUAAGGCUAGUCCGUUAUCAACUUGAAAAAGUGGCACCGAGUCGGUGC | |
| ZNF729 | CGAGAUGGGAAAGAACUCCGUUUAAGAGCUAUGCUGGAAACAGCAUAGCAAGU | 1420 |
| | UUAAAUAAGGCUAGUCCGUUAUCAACUUGAAAAAGUGGCACCGAGUCGGUGC | |
| ZNF750 | UGGGCUCCGAGGAUUACUCGUUUAAGAGCUAUGCUGGAAACAGCAUAGCAAGU | 1421 |
| | UUAAAUAAGGCUAGUCCGUUAUCAACUUGAAAAAGUGGCACCGAGUCGGUGC | |
| ZNF75A | CUGGCUCUGUACCUGGACAGUUUAAGAGCUAUGCUGGAAACAGCAUAGCAAGU | 1422 |
| | UUAAAUAAGGCUAGUCCGUUAUCAACUUGAAAAAGUGGCACCGAGUCGGUGC | |
| ZNF765 | ACUGGGAGGCGCUCAGGGAGUUUAAGAGCUAUGCUGGAAACAGCAUAGCAAGU | 1423 |
| | UUAAAUAAGGCUAGUCCGUUAUCAACUUGAAAAAGUGGCACCGAGUCGGUGC | |
| ZNF771 | UCGGCGACCUGGAGCUCUGGUUUAAGAGCUAUGCUGGAAACAGCAUAGCAAGU | 1424 |
| | UUAAAUAAGGCUAGUCCGUUAUCAACUUGAAAAAGUGGCACCGAGUCGGUGC | |
| ZNF773 | GGAAGCUGGUUGUUCGCUGGUUUAAGAGCUAUGCUGGAAACAGCAUAGCAAGU | 1425 |
| | UUAAAUAAGGCUAGUCCGUUAUCAACUUGAAAAAGUGGCACCGAGUCGGUGC | |
| ZNF773 | GCAAGCUGAGUUCUCUUGAGUUUAAGAGCUAUGCUGGAAACAGCAUAGCAAGU | 1426 |
| | UUAAAUAAGGCUAGUCCGUUAUCAACUUGAAAAAGUGGCACCGAGUCGGUGC | |
| ZNF773 | UCGCUGCGGCGACCAGCUCGUUUAAGAGCUAUGCUGGAAACAGCAUAGCAAGU | 1427 |
| | UUAAAUAAGGCUAGUCCGUUAUCAACUUGAAAAAGUGGCACCGAGUCGGUGC | |
| ZNF774 | GGCACAGCCUCGGGGUUGCGUUUAAGAGCUAUGCUGGAAACAGCAUAGCAAGU | 1428 |
| | UUAAAUAAGGCUAGUCCGUUAUCAACUUGAAAAAGUGGCACCGAGUCGGUGC | |
| ZNF778 | GACAGCCCGAGGACACGCGGUUUAAGAGCUAUGCUGGAAACAGCAUAGCAAGU | 1429 |
| | UUAAAUAAGGCUAGUCCGUUAUCAACUUGAAAAAGUGGCACCGAGUCGGUGC | |
| ZNF778 | UCCCGGACCAGCUUCCCCGGUUUAAGAGCUAUGCUGGAAACAGCAUAGCAAGU | 1430 |
| | UUAAAUAAGGCUAGUCCGUUAUCAACUUGAAAAAGUGGCACCGAGUCGGUGC | |
| ZNF784 | GCUCCUGGGAUCGCGACUCGUUUAAGAGCUAUGCUGGAAACAGCAUAGCAAGU | 1431 |
| | UUAAAUAAGGCUAGUCCGUUAUCAACUUGAAAAAGUGGCACCGAGUCGGUGC | |
| ZNF789 | GGAACAGACACAACCACUCGUUUAAGAGCUAUGCUGGAAACAGCAUAGCAAGU | 1432 |
| | UUAAAUAAGGCUAGUCCGUUAUCAACUUGAAAAAGUGGCACCGAGUCGGUGC | |
| ZNF804B | CGAGGUGGCUGCUCAACCGGUUUAAGAGCUAUGCUGGAAACAGCAUAGCAAGU | 1433 |
| | UUAAAUAAGGCUAGUCCGUUAUCAACUUGAAAAAGUGGCACCGAGUCGGUGC | |
| ZNF816 | GAGCAGAUUCGCACAAACCGUUUAAGAGCUAUGCUGGAAACAGCAUAGCAAGU | 1434 |
| | UUAAAUAAGGCUAGUCCGUUAUCAACUUGAAAAAGUGGCACCGAGUCGGUGC | |
| ZNF823 | UCCCCUGGGCCGCAAGAUGGUUUAAGAGCUAUGCUGGAAACAGCAUAGCAAGU | 1435 |
| | UUAAAUAAGGCUAGUCCGUUAUCAACUUGAAAAAGUGGCACCGAGUCGGUGC | |
| ZNF83 | UGAGGACGAUAGAACGAUUGUUUAAGAGCUAUGCUGGAAACAGCAUAGCAAGU | 1436 |
| | UUAAAUAAGGCUAGUCCGUUAUCAACUUGAAAAAGUGGCACCGAGUCGGUGC | |
| ZNF83 | CUUCAUGCUACACAGUCCAGUUUAAGAGCUAUGCUGGAAACAGCAUAGCAAGU | 1437 |
| | UUAAAUAAGGCUAGUCCGUUAUCAACUUGAAAAAGUGGCACCGAGUCGGUGC | |
| ZNF831 | CCCGCGCCCCGCUAGUGACGUUUAAGAGCUAUGCUGGAAACAGCAUAGCAAGU | 1438 |
| | UUAAAUAAGGCUAGUCCGUUAUCAACUUGAAAAAGUGGCACCGAGUCGGUGC | |
| ZNF846 | GACGCUCCGGACUUCUGCUGUUUAAGAGCUAUGCUGGAAACAGCAUAGCAAGU | 1439 |
| | UUAAAUAAGGCUAGUCCGUUAUCAACUUGAAAAAGUGGCACCGAGUCGGUGC | |
| ZNF852 | CGUUUGGAUGAUUGUCUCUGUUUAAGAGCUAUGCUGGAAACAGCAUAGCAAGU | 1440 |
| | UUAAAUAAGGCUAGUCCGUUAUCAACUUGAAAAAGUGGCACCGAGUCGGUGC | |
| ZNF879 | ACACCGCACAAGAGGCGAGGUUUAAGAGCUAUGCUGGAAACAGCAUAGCAAGU | 1441 |
| | UUAAAUAAGGCUAGUCCGUUAUCAACUUGAAAAAGUGGCACCGAGUCGGUGC | |
| ZNF91 | CGCUGCCGCCGGAGUUUCCGUUUAAGAGCUAUGCUGGAAACAGCAUAGCAAGU | 1442 |
| | UUAAAUAAGGCUAGUCCGUUAUCAACUUGAAAAAGUGGCACCGAGUCGGUGC | |
| ZNF93 | AACAGGGCGGCUUCUGGUUGUUUAAGAGCUAUGCUGGAAACAGCAUAGCAAGU | 1443 |
| | UUAAAUAAGGCUAGUCCGUUAUCAACUUGAAAAAGUGGCACCGAGUCGGUGC | |
| ZNF99 | CACAGGGCCACAGAGGCUAGUUUAAGAGCUAUGCUGGAAACAGCAUAGCAAGU | 1444 |
| | UUAAAUAAGGCUAGUCCGUUAUCAACUUGAAAAAGUGGCACCGAGUCGGUGC | |
| ZNF99 | UAGUCACAGUGCAGGAAGGGUUUAAGAGCUAUGCUGGAAACAGCAUAGCAAGU | 1445 |
| | UUAAAUAAGGCUAGUCCGUUAUCAACUUGAAAAAGUGGCACCGAGUCGGUGC | |
| ZSCAN16 | CAGCCUUCCGGGAGAGGAUGUUUAAGAGCUAUGCUGGAAACAGCAUAGCAAGU | 1446 |
| | UUAAAUAAGGCUAGUCCGUUAUCAACUUGAAAAAGUGGCACCGAGUCGGUGC | |
| ZSCAN2 | CCUCUCCGGCUCACCUCUCGUUUAAGAGCUAUGCUGGAAACAGCAUAGCAAGU | 1447 |
| | UUAAAUAAGGCUAGUCCGUUAUCAACUUGAAAAAGUGGCACCGAGUCGGUGC | |
| ZSCAN21 | UCAGAGCCGCUCCGGGUACGUUUAAGAGCUAUGCUGGAAACAGCAUAGCAAGU | 1448 |
| | UUAAAUAAGGCUAGUCCGUUAUCAACUUGAAAAAGUGGCACCGAGUCGGUGC | |
| ZSCAN5A | UAACUUUCUCAUCAAGCUUGUUUAAGAGCUAUGCUGGAAACAGCAUAGCAAGU | 1449 |
| | UUAAAUAAGGCUAGUCCGUUAUCAACUUGAAAAAGUGGCACCGAGUCGGUGC | |
| ZSCAN5A | UCCGCGUCGAGGCCCUACGGUUUAAGAGCUAUGCUGGAAACAGCAUAGCAAGU | 1450 |
| | UUAAAUAAGGCUAGUCCGUUAUCAACUUGAAAAAGUGGCACCGAGUCGGUGC | |
| ZSCAN5B | AUUCAUGUGCCAAGUCUCAGUUUAAGAGCUAUGCUGGAAACAGCAUAGCAAGU | 1451 |
| | UUAAAUAAGGCUAGUCCGUUAUCAACUUGAAAAAGUGGCACCGAGUCGGUGC | |
| ZSCAN5B | GGUGAGUGUCCAGCGGCGAGUUUAAGAGCUAUGCUGGAAACAGCAUAGCAAGU | 1452 |
| | UUAAAUAAGGCUAGUCCGUUAUCAACUUGAAAAAGUGGCACCGAGUCGGUGC | |

[0193] In some embodiments, a gRNA provided herein targets a target site in a gene in a T cell or DNA regulatory element thereof, wherein the gene is selected from the list consisting of: BMP4, E2F7, ESRRG, LYL1, STAT5A, THAP10, ZNF362, ZSCAN1, ANHX, CPEB1, CSRNP1, EN2, EPAS1, IRX3, LHX8, NR5A2, PRDM16, RAX2, SCML4, SMAD1, SOX6, SUV39H1, TFDP1, ZNF287, ZNF438, ZNF681, and ZNF853. In some embodiments, a gRNA provided herein comprises a spacer sequence selected from any one of SEQ ID NOS: 485-511, as shown in Table 1. In some embodiments, the gRNA further comprises a scaffold sequence set forth in SEQ ID NOS: 1454. In some embodiments, the gRNA comprises the sequence selected from any one of SEQ ID NOS: 969-995, as shown in Table 2, or a sequence having at or at least 80%, 85%, 90%, 91%, 92%, 93%, 94%, 95%, 96%, 97%, 98%, 99%, 99.5%, 99.9%, or 100% sequence identity to any one of SEQ ID NO: 969-995. In some embodiments, the gRNA is set forth in any one of SEQ ID NOS: 969-995. In some embodiments, any of the provided gRNA sequences is complexed with or is provided in combination with a Cas9. In some embodiments, the Cas9 is a dCas9. In some embodiments, the dCas9 is a dSpCas9, such as a dSpCas9 set forth in SEQ ID NO: 1464.

[0194] In some embodiments, a gRNA provided herein targets a target site in a gene in a T cell or DNA regulatory element thereof, wherein the gene is selected from the list consisting of BMP4, E2F7, ESRRG, LYL1, STAT5A, THAP10, ZNF362, and ZSCAN1. In some embodiments, a gRNA provided herein comprises a spacer sequence selected from any one of SEQ ID NOS: 485-492, as shown in Table 1. In some embodiments, the gRNA further comprises a scaffold sequence set forth in SEQ ID NO: 1454. In some embodiments, the gRNA comprises the sequence selected from any one of SEQ ID NOS: 969-976, as shown in Table 2, or a sequence having at or at least 80%, 85%, 90%, 91%, 92%, 93%, 94%, 95%, 96%, 97%, 98%, 99%, 99.5%, 99.9%, or 100% sequence identity to any one of SEQ ID NO: 969-976. In some embodiments, the gRNA is set forth in any one of SEQ ID NOS: 969-976. In some embodiments, any of the provided gRNA sequences is complexed with or is provided in combination with a Cas9. In some embodiments, the Cas9 is a dCas9. In some embodiments, the dCas9 is a dSpCas9, such as a dSpCas9 set forth in SEQ ID NO: 1464.

[0195] In some embodiments, a gRNA provided herein targets BMP4 or a DNA regulatory element thereof. BMP4 is a gene that encodes Bone morphogenetic protein 4 (also known as ZYME, BMP2B, OFC11, BMP2B1, MCOPS6). BMP4 belongs to the TGF-β superfamily of proteins and is upstream of IL-2 signaling. BMP4 is activated by TCR stimulation and is involved in naïve CD4+ T cell activation, proliferation, and homeostasis. In some embodiments, the gRNA targets a target site in BMP4 or a DNA regulatory element thereof that comprises SEQ ID NO: 1, a contiguous portion thereof of at least 14 nucleotides (e.g. 14, 15, 16, 17, 18 or 19 nucleotides), a complementary sequence of any of the foregoing, or a sequence having at or at least 80%, 85%, 90%, 91%, 92%, 93%, 94%, 95%, 96%, 97%, 98%, 99%, 99.5%, 99.9%, or 100% sequence identity to any of the foregoing. In some embodiments, the gRNA comprises a spacer sequence comprising SEQ ID NO: 485, a contiguous portion thereof of at least 14 nt (e.g. 14, 15, 16, 17, 18 or 19 nucleotides), or a sequence having at or at least 80%, 85%, 90%, 91%, 92%, 93%, 94%, 95%, 96%, 97%, 98%, 99%, 99.5%, 99.9%, or 100% sequence identity to any of the foregoing. In some embodiments, the gRNA further comprises a scaffold sequence. In some embodiments, the scaffold sequence comprises the sequence set forth in SEQ ID NO: 1454, or a sequence having at or at least 80%, 85%, 90%, 91%, 92%, 93%, 94%, 95%, 96%, 97%, 98%, 99%, 99.5%, 99.9%, or 100% sequence identity to SEQ ID NO: 1454. In some embodiments, the gRNA, including a spacer sequence and a scaffold sequence, comprises SEQ ID NO: 969, or a sequence having at or at least 80%, 85%, 90%, 91%, 92%, 93%, 94%, 95%, 96%, 97%, 98%, 99%, 99.5%, 99.9%, or 100% sequence identity to all or a portion thereof. In some embodiments, the gRNA targeting BMP4 or a DNA regulatory element thereof, is set forth in SEQ ID NO: 969. In some embodiments, a provided DNA-targeting system for epigenetic modification of BMP4 includes any of the above gRNAs complexed with a Cas protein, such as a Cas9 protein. In some embodiments, the Cas9 is a dSpCas9, such as a dSpCas9 set forth in SEQ ID NO: 1464.

[0196] In some embodiments, a gRNA provided herein targets E2F7 or a DNA regulatory element thereof. E2F7 is a gene that encodes an E2F transcription factor 7. E2F7 is involved in DNA damage repair and genomic stability. It has also been shown to play a role in stress-induced skin cancer. In some embodiments, the gRNA targets a target site in E2F7 or a DNA regulatory element thereof that comprises SEQ ID NO: 2, a contiguous portion thereof of at least 14 nucleotides (e.g. 14, 15, 16, 17, 18 or 19 nucleotides), a complementary sequence of any of the foregoing, or a sequence having at or at least 80%, 85%, 90%, 91%, 92%, 93%, 94%, 95%, 96%, 97%, 98%, 99%, 99.5%, 99.9%, or 100% sequence identity to any of the foregoing. In some embodiments, the gRNA comprises a spacer sequence comprising SEQ ID NO: 486, a contiguous portion thereof of at least 14 nt (e.g. 14, 15, 16, 17, 18 or 19 nucleotides), or a sequence having at or at least 80%, 85%, 90%, 91%, 92%, 93%, 94%, 95%, 96%, 97%, 98%, 99%, 99.5%, 99.9%, or 100% sequence identity to any of the foregoing. In some embodiments, the gRNA further comprises a scaffold sequence. In some embodiments, the scaffold sequence comprises the sequence set forth in SEQ ID NO: 1454, or a sequence having at or at least 80%, 85%, 90%, 91%, 92%, 93%, 94%, 95%, 96%, 97%, 98%, 99%, 99.5%, 99.9%, or 100% sequence identity to SEQ ID NO: 1454. In some embodiments, the gRNA, including a spacer sequence and a scaffold sequence, comprises SEQ ID NO: 970, or a sequence having at or at least 80%, 85%, 90%, 91%, 92%, 93%, 94%, 95%, 96%, 97%, 98%, 99%, 99.5%, 99.9%, or 100% sequence identity to all or a portion thereof. In some embodiments, the gRNA targeting E2F7 or a DNA regulatory element thereof, is set forth in SEQ ID NO: 970. In some embodiments, a provided DNA-targeting system for epigenetic modification of E2F7 includes any of the above gRNAs complexed with a Cas protein, such as a Cas9 protein. In some embodiments, the Cas9 is a dSpCas9, such as a dSpCas9 set forth in SEQ ID NO: 1464.

[0197] In some embodiments, a gRNA provided herein targets ESRRG or a DNA regulatory element thereof. Estrogen-related receptor gamma (also known as ERR-gamma, NR3B3, nuclear receptor subfamily 3, group B, member 3) is encoded by the ESRRG gene. ESRRG is a nuclear receptor that behaves as a constitutive activator. In some embodiments, the gRNA targets a target site in ESRRG or a DNA regulatory element thereof that comprises SEQ ID NO: 3, a contiguous portion thereof of at least 14 nucleotides (e.g. 14, 15, 16, 17, 18 or 19 nucleotides), a complementary sequence of any of the foregoing, or a sequence having at or at least 80%, 85%, 90%, 91%, 92%, 93%, 94%, 95%, 96%, 97%, 98%, 99%, 99.5%, 99.9%, or 100% sequence identity to any of the foregoing. In some embodiments, the gRNA comprises a spacer sequence comprising SEQ ID NO: 487, a contiguous portion thereof of at least 14 nt (e.g. 14, 15, 16, 17, 18 or 19 nucleotides), or a sequence having at or at least 80%, 85%, 90%, 91%, 92%, 93%, 94%, 95%, 96%, 97%, 98%, 99%, 99.5%, 99.9%, or 100% sequence identity to any of the foregoing. In some embodiments, the gRNA further comprises a scaffold sequence. In some embodiments, the scaffold sequence comprises the sequence set forth in SEQ ID NO: 1454, or a sequence having at or at least 80%, 85%, 90%, 91%, 92%, 93%, 94%, 95%, 96%, 97%, 98%, 99%, 99.5%, 99.9%, or 100% sequence identity to SEQ ID NO: 1454. In some embodiments, the gRNA, including a spacer sequence and a scaffold sequence, comprises SEQ ID NO: 971, or a sequence having at or at least 80%, 85%, 90%, 91%, 92%, 93%, 94%, 95%, 96%, 97%, 98%, 99%, 99.5%, 99.9%, or 100% sequence identity to all or a portion thereof. In some embodiments, the gRNA targeting ESRRG or a DNA regulatory element thereof, is set forth in SEQ ID NO: 971. In some embodiments, a provided DNA-targeting system for epigenetic modification of ESRRG includes any of the above gRNAs complexed with a Cas protein, such as a Cas9 protein. In some embodiments, the Cas9 is a dSpCas9, such as a dSpCas9 set forth in SEQ ID NO: 1464.

[0198] In some embodiments, a gRNA provided herein targets LYL1 or a DNA regulatory element thereof. Protein LYL-1 basic helix-loop-helix family member (also known as bHLHa18) is encoded by the LYL1 gene. LYL1 is a basic helix-loop-helix transcription factor that plays a role in blood vessel maturation and hematopoeisis. A translocation between this locus and the T cell receptor beta locus on chromosome 7 has been associated with acute lymphoblastic leukemia (T-ALL). In some embodiments, the gRNA targets a target site in LYL1 or a DNA regulatory element thereof that comprises SEQ ID NO: 4, a contiguous portion thereof of at least 14 nucleotides (e.g. 14, 15, 16, 17, 18 or 19 nucleotides), a complementary sequence of any of the foregoing, or a sequence having at or at least 80%, 85%, 90%, 91%, 92%, 93%, 94%, 95%, 96%, 97%, 98%, 99%, 99.5%, 99.9%, or 100% sequence identity to any of the foregoing. In some embodiments, the gRNA comprises a spacer sequence comprising SEQ ID NO: 488, a contiguous portion thereof of at least 14 nt (e.g. 14, 15, 16, 17, 18 or 19 nucleotides), or a sequence having at or at least 80%, 85%, 90%, 91%, 92%, 93%, 94%, 95%, 96%, 97%, 98%, 99%, 99.5%, 99.9%, or 100% sequence identity to any of the foregoing. In some embodiments, the gRNA further comprises a scaffold sequence. In some embodiments, the scaffold sequence comprises the sequence set forth in SEQ ID NO: 1454, or a sequence having at or at least 80%, 85%, 90%, 91%, 92%, 93%, 94%, 95%, 96%, 97%, 98%, 99%, 99.5%, 99.9%, or 100% sequence identity to SEQ ID NO: 1454. In some embodiments, the gRNA, including a spacer sequence and a scaffold sequence, comprises SEQ ID NO: 972, or a sequence having at or at least 80%, 85%, 90%, 91%, 92%, 93%, 94%, 95%, 96%, 97%, 98%, 99%, 99.5%, 99.9%, or 100% sequence identity to all or a portion thereof. In some embodiments, the gRNA targeting LYL1 or a DNA regulatory element thereof, is set forth in SEQ ID NO: 972. In some embodiments, a provided DNA-targeting system for epigenetic modification of LYL1 includes any of the above gRNAs complexed with a Cas protein, such as a Cas9 protein. In some embodiments, the Cas9 is a dSpCas9, such as a dSpCas9 set forth in SEQ ID NO: 1464.

[0199] In some embodiments, a gRNA provided herein targets STAT5A or a DNA regulatory element thereof. Signal transducer and activator of transcription 5A (also known as MGF, STAT5) is encoded by the STAT5A gene. In response to cytokines and growth factors, STAT family members are phosphorylated by the receptor associated kinases, and then form homo- or heterodimers that translocate to the cell nucleus where they act as transcription activators. This protein is activated by, and mediates the responses of many cell ligands, such as IL2, IL3, IL7 GM-CSF, erythropoietin, thrombopoietin, and different growth hormones. Constitutively active STAT5A can induce polyfunctional CD4+T and improve tumor elimination in CD19 CART therapy. In some embodiments, the gRNA targets a target site in STAT5A or a DNA regulatory element thereof that comprises SEQ ID NO: 5, a contiguous portion thereof of at least 14 nucleotides (e.g. 14, 15, 16, 17, 18 or 19 nucleotides), a complementary sequence of any of the foregoing, or a sequence having at or at least 80%, 85%, 90%, 91%, 92%, 93%, 94%, 95%, 96%, 97%, 98%, 99%, 99.5%, 99.9%, or 100% sequence identity to any of the foregoing. In some embodiments, the gRNA comprises a spacer sequence comprising SEQ ID NO: 489, a contiguous portion thereof of at least 14 nt (e.g. 14, 15, 16, 17, 18 or 19 nucleotides), or a sequence having at or at least 80%, 85%, 90%, 91%, 92%, 93%, 94%, 95%, 96%, 97%, 98%, 99%, 99.5%, 99.9%, or 100% sequence identity to any of the foregoing. In some embodiments, the gRNA further comprises a scaffold sequence. In some embodiments, the scaffold sequence comprises the sequence set forth in SEQ ID NO: 1454, or a sequence having at or at least 80%, 85%, 90%, 91%, 92%, 93%, 94%, 95%, 96%, 97%, 98%, 99%, 99.5%, 99.9%, or 100% sequence identity to SEQ ID NO: 1454. In some embodiments, the gRNA, including a spacer sequence and a scaffold sequence, comprises SEQ ID NO: 973, or a sequence having at or at least 80%, 85%, 90%, 91%, 92%, 93%, 94%, 95%, 96%, 97%, 98%, 99%, 99.5%, 99.9%, or 100% sequence identity to all or a portion thereof. In some embodiments, the gRNA targeting STAT5A or a DNA regulatory element thereof, is set forth in SEQ ID NO: 973. In some embodiments, a provided DNA-targeting system for epigenetic modification of STAT5A includes any of the above gRNAs complexed with a Cas protein, such as a Cas9 protein. In some embodiments, the Cas9 is a dSpCas9, such as a dSpCas9 set forth in SEQ ID NO: 1464.

[0200] In some embodiments, a gRNA provided herein targets THAP10 or a DNA regulatory element thereof. THAP domain containing 10 is encoded by the THAP10 gene. This gene encodes a member of a family of proteins sharing an N-terminal Thanatos-associated domain. The Thanatos-associated domain contains a zinc finger signature similar to DNA-binding domains. In some embodiments, the gRNA targets a target site in THAP10 or a DNA regulatory element thereof that comprises SEQ ID NO: 6, a contiguous portion thereof of at least 14 nucleotides (e.g. 14, 15, 16, 17, 18 or 19 nucleotides), a complementary sequence of any of the foregoing, or a sequence having at or at least 80%, 85%, 90%, 91%, 92%, 93%, 94%, 95%, 96%, 97%, 98%, 99%, 99.5%, 99.9%, or 100% sequence identity to any of the foregoing. In some embodiments, the gRNA comprises a spacer sequence comprising SEQ ID NO: 490, a contiguous portion thereof of at least 14 nt (e.g. 14, 15, 16, 17, 18 or 19 nucleotides), or a sequence having at or at least 80%, 85%, 90%, 91%, 92%, 93%, 94%, 95%, 96%, 97%, 98%, 99%, 99.5%, 99.9%, or 100% sequence identity to any of the foregoing. In some embodiments, the gRNA further comprises a scaffold sequence. In some embodiments, the scaffold sequence comprises the sequence set forth in SEQ ID NO: 1454, or a sequence having at or at least 80%, 85%, 90%, 91%, 92%, 93%, 94%, 95%, 96%, 97%, 98%, 99%, 99.5%, 99.9%, or 100% sequence identity to SEQ ID NO: 1454. In some embodiments, the gRNA, including a spacer sequence and a scaffold sequence, comprises SEQ ID NO: 974, or a sequence having at or at least 80%, 85%, 90%, 91%, 92%, 93%, 94%, 95%, 96%, 97%, 98%, 99%, 99.5%, 99.9%, or 100% sequence identity to all or a portion thereof. In some embodiments, the gRNA targeting THAP10 or a DNA regulatory element thereof, is set forth in SEQ ID NO: 974. In some embodiments, a provided DNA-targeting system for epigenetic modification of THAP10 includes any of the above gRNAs complexed with a Cas protein, such as a Cas9 protein. In some embodiments, the Cas9 is a dSpCas9, such as a dSpCas9 set forth in SEQ ID NO: 1464.

[0201] In some embodiments, a gRNA provided herein targets ZNF362 or a DNA regulatory element thereof. Zinc finger protein 362 (also known as RN, lin-29) is encoded by the ZNF362 gene. ZNF362 is a novel zinc finger gene. In some embodiments, the gRNA targets a target site in ZNF362 or a DNA regulatory element thereof that comprises SEQ ID NO: 7, a contiguous portion thereof of at least 14 nucleotides (e.g. 14, 15, 16, 17, 18 or 19 nucleotides), a complementary sequence of any of the foregoing, or a sequence having at or at least 80%, 85%, 90%, 91%, 92%, 93%, 94%, 95%, 96%, 97%, 98%, 99%, 99.5%, 99.9%, or 100% sequence identity to any of the foregoing. In some embodiments, the gRNA comprises a spacer sequence comprising SEQ ID NO: 491, a contiguous portion thereof of at least 14 nt (e.g. 14, 15, 16, 17, 18 or 19 nucleotides), or a sequence having at or at least 80%, 85%, 90%, 91%, 92%, 93%, 94%, 95%, 96%, 97%, 98%, 99%, 99.5%, 99.9%, or 100% sequence identity to any of the foregoing. In some embodiments, the gRNA further comprises a scaffold sequence. In some embodiments, the scaffold sequence comprises the sequence set forth in SEQ ID NO: 1454, or a sequence having at or at least 80%, 85%, 90%, 91%, 92%, 93%, 94%, 95%, 96%, 97%, 98%, 99%, 99.5%, 99.9%, or 100% sequence identity to SEQ ID NO: 1454. In some embodiments, the gRNA, including a spacer sequence and a scaffold sequence, comprises SEQ ID NO: 975, or a sequence having at or at least 80%, 85%, 90%, 91%, 92%, 93%, 94%, 95%, 96%, 97%, 98%, 99%, 99.5%, 99.9%, or 100% sequence identity to all or a portion thereof. In some embodiments, the gRNA targeting ZNF362 or a DNA regulatory element thereof, is set forth in SEQ ID NO: 975. In some embodiments, a provided DNA-targeting system for epigenetic modification of ZNF362 includes any of the above gRNAs complexed with a Cas protein, such as a Cas9 protein. In some embodiments, the Cas9 is a dSpCas9, such as a dSpCas9 set forth in SEQ ID NO: 1464.

[0202] In some embodiments, a gRNA provided herein targets ZSCAN1 or a DNA regulatory element thereof. Zinc finger and SCAN domain containing 1 (also known as MZF-1, ZNF915) is encoded by the ZSCAN1 gene. ZSCAN1 is a novel DNA binding gene involved in regulation of transcription. In some embodiments, the gRNA targets a target site in ZSCAN1 or a DNA regulatory element thereof that comprises SEQ ID NO: 8, a contiguous portion thereof of at least 14 nucleotides (e.g. 14, 15, 16, 17, 18 or 19 nucleotides), a complementary sequence of any of the foregoing, or a sequence having at or at least 80%, 85%, 90%, 91%, 92%, 93%, 94%, 95%, 96%, 97%, 98%, 99%, 99.5%, 99.9%, or 100% sequence identity to any of the foregoing. In some embodiments, the gRNA comprises a spacer sequence comprising SEQ ID NO: 492, a contiguous portion thereof of at least 14 nt (e.g. 14, 15, 16, 17, 18 or 19 nucleotides), or a sequence having at or at least 80%, 85%, 90%, 91%, 92%, 93%, 94%, 95%, 96%, 97%, 98%, 99%, 99.5%, 99.9%, or 100% sequence identity to any of the foregoing. In some embodiments, the gRNA further comprises a scaffold sequence. In some embodiments, the scaffold sequence comprises the sequence set forth in SEQ ID NO: 1454, or a sequence having at or at least 80%, 85%, 90%, 91%, 92%, 93%, 94%, 95%, 96%, 97%, 98%, 99%, 99.5%, 99.9%, or 100% sequence identity to SEQ ID NO: 1454. In some embodiments, the gRNA, including a spacer sequence and a scaffold sequence, comprises SEQ ID NO: 976, or a sequence having at or at least 80%, 85%, 90%, 91%, 92%, 93%, 94%, 95%, 96%, 97%, 98%, 99%, 99.5%, 99.9%, or 100% sequence identity to all or a portion thereof. In some embodiments, the gRNA targeting ZSCAN1 or a DNA regulatory element thereof, is set forth in SEQ ID NO: 976. In some embodiments, a provided DNA-targeting system for epigenetic modification of ZSCAN1 includes any of the above gRNAs complexed with a Cas protein, such as a Cas9 protein. In some embodiments, the Cas9 is a dSpCas9, such as a dSpCas9 set forth in SEQ ID NO: 1464.

[0203] In some embodiments, a gRNA provided herein targets ANHX or a DNA regulatory element thereof. Anomalous Homeobox protein is encoded by the ANHX gene. ANHX is a novel DNA binding gene and is involved in regulation of transcription. In some embodiments, the gRNA targets a target site in ANHX or a DNA regulatory element thereof that comprises SEQ ID NO: 9, a contiguous portion thereof of at least 14 nucleotides (e.g. 14, 15, 16, 17, 18 or 19 nucleotides), a complementary sequence of any of the foregoing, or a sequence having at or at least 80%, 85%, 90%, 91%, 92%, 93%, 94%, 95%, 96%, 97%, 98%, 99%, 99.5%, 99.9%, or 100% sequence identity to any of the foregoing. In some embodiments, the gRNA comprises a spacer sequence comprising SEQ ID NO: 493, a contiguous portion thereof of at least 14 nt (e.g. 14, 15, 16, 17, 18 or 19 nucleotides), or a sequence having at or at least 80%, 85%, 90%, 91%, 92%, 93%, 94%, 95%, 96%, 97%, 98%, 99%, 99.5%, 99.9%, or 100% sequence identity to any of the foregoing. In some embodiments, the gRNA further comprises a scaffold sequence. In some embodiments, the scaffold sequence comprises the sequence set forth in SEQ ID NO: 1454, or a sequence having at or at least 80%, 85%, 90%, 91%, 92%, 93%, 94%, 95%, 96%, 97%, 98%, 99%, 99.5%, 99.9%, or 100% sequence identity to SEQ ID NO: 1454. In some embodiments, the gRNA, including a spacer sequence and a scaffold sequence, comprises SEQ ID NO: 977, or a sequence having at or at least 80%, 85%, 90%, 91%, 92%, 93%, 94%, 95%, 96%, 97%, 98%, 99%, 99.5%, 99.9%, or 100% sequence identity to all or a portion thereof. In some embodiments, the gRNA targeting ANHX or a DNA regulatory element thereof, is set forth in SEQ ID NO: 977. In some embodiments, a provided DNA-targeting system for epigenetic modification of ANHX includes any of the above gRNAs complexed with a Cas protein, such as a Cas9 protein. In some embodiments, the Cas9 is a dSpCas9, such as a dSpCas9 set forth in SEQ ID NO: 1464.

[0204] In some embodiments, a gRNA provided herein targets CPEB1 or a DNA regulatory element thereof. Cytoplasmic polyadenylation element-binding protein 1 (also known as CPEB, CPEB-1, h-CPEB, CPE-BP1, hCPEB-1) is encoded by the CPEB1 gene. CPEB1 is involved in the regulation of mRNA translation, as well as processing of the 3′ untranslated region, and may play a role in cell proliferation and tumorigenesis. In some embodiments, the gRNA targets a target site in CPEB1 or a DNA regulatory element thereof that comprises SEQ ID NO: 10, a contiguous portion thereof of at least 14 nucleotides (e.g. 14, 15, 16, 17, 18 or 19 nucleotides), a complementary sequence of any of the foregoing, or a sequence having at or at least 80%, 85%, 90%, 91%, 92%, 93%, 94%, 95%, 96%, 97%, 98%, 99%, 99.5%, 99.9%, or 100% sequence identity to any of the foregoing. In some embodiments, the gRNA comprises a spacer sequence comprising SEQ ID NO: 494, a contiguous portion thereof of at least 14 nt (e.g. 14, 15, 16, 17, 18 or 19 nucleotides), or a sequence having at or at least 80%, 85%, 90%, 91%, 92%, 93%, 94%, 95%, 96%, 97%, 98%, 99%, 99.5%, 99.9%, or 100% sequence identity to any of the foregoing. In some embodiments, the gRNA further comprises a scaffold sequence. In some embodiments, the scaffold sequence comprises the sequence set forth in SEQ ID NO: 1454, or a sequence having at or at least 80%, 85%, 90%, 91%, 92%, 93%, 94%, 95%, 96%, 97%, 98%, 99%, 99.5%, 99.9%, or 100% sequence identity to SEQ ID NO: 1454. In some embodiments, the gRNA, including a spacer sequence and a scaffold sequence, comprises SEQ ID NO: 978, or a sequence having at or at least 80%, 85%, 90%, 91%, 92%, 93%, 94%, 95%, 96%, 97%, 98%, 99%, 99.5%, 99.9%, or 100% sequence identity to all or a portion thereof. In some embodiments, the gRNA targeting CPEB1 or a DNA regulatory element thereof, is set forth in SEQ ID NO: 978. In some embodiments, a provided DNA-targeting system for epigenetic modification of CPEB1 includes any of the above gRNAs complexed with a Cas protein, such as a Cas9 protein. In some embodiments, the Cas9 is a dSpCas9, such as a dSpCas9 set forth in SEQ ID NO: 1464.

[0205] In some embodiments, a gRNA provided herein targets CSRNP1 or a DNA regulatory element thereof. Cysteine and serine rich nuclear protein 1 (also known as AXUD1, URAX1, TAIP-3, CSRNP-1, FAM130B) is encoded by the CSRNP1 gene. CSRNP1 is suggested to have a tumor suppressor function and is expressed in response to elevated levels of axin. Low expression of CSRNP1 and CSRNP2 have been associated with worse overall survival in clear cell renal cell carcinoma (ccRCC). Higher expression of CSRNP has been associated with better prognosis in tumor patients. In some embodiments, the gRNA targets a target site in CSRNP1 or a DNA regulatory element thereof that comprises SEQ ID NO: 11, a contiguous portion thereof of at least 14 nucleotides (e.g. 14, 15, 16, 17, 18 or 19 nucleotides), a complementary sequence of any of the foregoing, or a sequence having at or at least 80%, 85%, 90%, 91%, 92%, 93%, 94%, 95%, 96%, 97%, 98%, 99%, 99.5%, 99.9%, or 100% sequence identity to any of the foregoing. In some embodiments, the gRNA comprises a spacer sequence comprising SEQ ID NO: 495, a contiguous portion thereof of at least 14 nt (e.g. 14, 15, 16, 17, 18 or 19 nucleotides), or a sequence having at or at least 80%, 85%, 90%, 91%, 92%, 93%, 94%, 95%, 96%, 97%, 98%, 99%, 99.5%, 99.9%, or 100% sequence identity to any of the foregoing. In some embodiments, the gRNA further comprises a scaffold sequence. In some embodiments, the scaffold sequence comprises the sequence set forth in SEQ ID NO: 1454, or a sequence having at or at least 80%, 85%, 90%, 91%, 92%, 93%, 94%, 95%, 96%, 97%, 98%, 99%, 99.5%, 99.9%, or 100% sequence identity to SEQ ID NO: 1454. In some embodiments, the gRNA, including a spacer sequence and a scaffold sequence, comprises SEQ ID NO: 979, or a sequence having at or at least 80%, 85%, 90%, 91%, 92%, 93%, 94%, 95%, 96%, 97%, 98%, 99%, 99.5%, 99.9%, or 100% sequence identity to all or a portion thereof. In some embodiments, the gRNA targeting CSRNP1 or a DNA regulatory element thereof, is set forth in SEQ ID NO: 979. In some embodiments, a provided DNA-targeting system for epigenetic modification of CSRNP1 includes any of the above gRNAs complexed with a Cas protein, such as a Cas9 protein. In some embodiments, the Cas9 is a dSpCas9, such as a dSpCas9 set forth in SEQ ID NO: 1464.

[0206] In some embodiments, a gRNA provided herein targets EN2 or a DNA regulatory element thereof. Engrailed homeobox 2 is encoded by the EN2 gene and is implicated in the control of pattern formation during development of the central nervous system. In some embodiments, the gRNA targets a target site in EN2 or a DNA regulatory element thereof that comprises SEQ ID NO: 12, a contiguous portion thereof of at least 14 nucleotides (e.g. 14, 15, 16, 17, 18 or 19 nucleotides), a complementary sequence of any of the foregoing, or a sequence having at or at least 80%, 85%, 90%, 91%, 92%, 93%, 94%, 95%, 96%, 97%, 98%, 99%, 99.5%, 99.9%, or 100% sequence identity to any of the foregoing. In some embodiments, the gRNA comprises a spacer sequence comprising SEQ ID NO: 496, a contiguous portion thereof of at least 14 nt (e.g. 14, 15, 16, 17, 18 or 19 nucleotides), or a sequence having at or at least 80%, 85%, 90%, 91%, 92%, 93%, 94%, 95%, 96%, 97%, 98%, 99%, 99.5%, 99.9%, or 100% sequence identity to any of the foregoing. In some embodiments, the gRNA further comprises a scaffold sequence. In some embodiments, the scaffold sequence comprises the sequence set forth in SEQ ID NO: 1454, or a sequence having at or at least 80%, 85%, 90%, 91%, 92%, 93%, 94%, 95%, 96%, 97%, 98%, 99%, 99.5%, 99.9%, or 100% sequence identity to SEQ ID NO: 1454. In some embodiments, the gRNA, including a spacer sequence and a scaffold sequence, comprises SEQ ID NO: 980, or a sequence having at or at least 80%, 85%, 90%, 91%, 92%, 93%, 94%, 95%, 96%, 97%, 98%, 99%, 99.5%, 99.9%, or 100% sequence identity to all or a portion thereof. In some embodiments, the gRNA targeting EN2 or a DNA regulatory element thereof, is set forth in SEQ ID NO: 980. In some embodiments, a provided DNA-targeting system for epigenetic modification of EN2 includes any of the above gRNAs complexed with a Cas protein, such as a Cas9 protein. In some embodiments, the Cas9 is a dSpCas9, such as a dSpCas9 set forth in SEQ ID NO: 1464.

[0207] In some embodiments, a gRNA provided herein targets EPAS1 or a DNA regulatory element thereof. Endothelial PAS domain protein 1 (also known as HLF, MOP2, ECYT4, HIF2A, PASD2, bHLHe73) is encoded by the EPAS1 gene. EPAS1 encodes a transcription factor involved in the induction of genes regulated by oxygen. The encoded protein contains a basic-helix-loop-helix domain protein dimerization domain and a signal transduction domain which respond to oxygen levels. In some embodiments, the gRNA targets a target site in EPAS1 or a DNA regulatory element thereof that comprises SEQ ID NO: 13, a contiguous portion thereof of at least 14 nucleotides (e.g. 14, 15, 16, 17, 18 or 19 nucleotides), a complementary sequence of any of the foregoing, or a sequence having at or at least 80%, 85%, 90%, 91%, 92%, 93%, 94%, 95%, 96%, 97%, 98%, 99%, 99.5%, 99.9%, or 100% sequence identity to any of the foregoing. In some embodiments, the gRNA comprises a spacer sequence comprising SEQ ID NO: 497, a contiguous portion thereof of at least 14 nt (e.g. 14, 15, 16, 17, 18 or 19 nucleotides), or a sequence having at or at least 80%, 85%, 90%, 91%, 92%, 93%, 94%, 95%, 96%, 97%, 98%, 99%, 99.5%, 99.9%, or 100% sequence identity to any of the foregoing. In some embodiments, the gRNA further comprises a scaffold sequence. In some embodiments, the scaffold sequence comprises the sequence set forth in SEQ ID NO: 1454, or a sequence having at or at least 80%, 85%, 90%, 91%, 92%, 93%, 94%, 95%, 96%, 97%, 98%, 99%, 99.5%, 99.9%, or 100% sequence identity to SEQ ID NO: 1454. In some embodiments, the gRNA, including a spacer sequence and a scaffold sequence, comprises SEQ ID NO: 981, or a sequence having at or at least 80%, 85%, 90%, 91%, 92%, 93%, 94%, 95%, 96%, 97%, 98%, 99%, 99.5%, 99.9%, or 100% sequence identity to all or a portion thereof. In some embodiments, the gRNA targeting EPAS1 or a DNA regulatory element thereof, is set forth in SEQ ID NO: 981. In some embodiments, a provided DNA-targeting system for epigenetic modification of EPAS1 includes any of the above gRNAs complexed with a Cas protein, such as a Cas9 protein. In some embodiments, the Cas9 is a dSpCas9, such as a dSpCas9 set forth in SEQ ID NO: 1464.

[0208] In some embodiments, a gRNA provided herein targets IRX3 or a DNA regulatory element thereof. Iroquois-class homeodomain protein IRX-3 (also known as Iroquois homeobox protein 3, IRX-1, IRXB1) is encoded by the IRX3 gene and plays a role in an early step of neural development. In some embodiments, the gRNA targets a target site in IRX3 or a DNA regulatory element thereof that comprises SEQ ID NO: 14, a contiguous portion thereof of at least 14 nucleotides (e.g. 14, 15, 16, 17, 18 or 19 nucleotides), a complementary sequence of any of the foregoing, or a sequence having at or at least 80%, 85%, 90%, 91%, 92%, 93%, 94%, 95%, 96%, 97%, 98%, 99%, 99.5%, 99.9%, or 100% sequence identity to any of the foregoing. In some embodiments, the gRNA comprises a spacer sequence comprising SEQ ID NO: 498, a contiguous portion thereof of at least 14 nt (e.g. 14, 15, 16, 17, 18 or 19 nucleotides), or a sequence having at or at least 80%, 85%, 90%, 91%, 92%, 93%, 94%, 95%, 96%, 97%, 98%, 99%, 99.5%, 99.9%, or 100% sequence identity to any of the foregoing. In some embodiments, the gRNA further comprises a scaffold sequence. In some embodiments, the scaffold sequence comprises the sequence set forth in SEQ ID NO: 1454, or a sequence having at or at least 80%, 85%, 90%, 91%, 92%, 93%, 94%, 95%, 96%, 97%, 98%, 99%, 99.5%, 99.9%, or 100% sequence identity to SEQ ID NO: 1454. In some embodiments, the gRNA, including a spacer sequence and a scaffold sequence, comprises SEQ ID NO: 982, or a sequence having at or at least 80%, 85%, 90%, 91%, 92%, 93%, 94%, 95%, 96%, 97%, 98%, 99%, 99.5%, 99.9%, or 100% sequence identity to all or a portion thereof. In some embodiments, the gRNA targeting IRX3 or a DNA regulatory element thereof, is set forth in SEQ ID NO: 982. In some embodiments, a provided DNA-targeting system for epigenetic modification of IRX3 includes any of the above gRNAs complexed with a Cas protein, such as a Cas9 protein. In some embodiments, the Cas9 is a dSpCas9, such as a dSpCas9 set forth in SEQ ID NO: 1464.

[0209] In some embodiments, a gRNA provided herein targets LHX8 or a DNA regulatory element thereof. LIM homeobox 8 (also known as LHX7) is encoded by the LHX8 gene. The LHX8 protein is a transcription factor and contains two tandemly repeated cysteine-rich double-zinc finger motifs known as LIM domains. LHX8 genes are involved in patterning and differentiation of various tissue types. In some embodiments, the gRNA targets a target site in LHX8 or a DNA regulatory element thereof that comprises SEQ ID NO: 15, a contiguous portion thereof of at least 14 nucleotides (e.g. 14, 15, 16, 17, 18 or 19 nucleotides), a complementary sequence of any of the foregoing, or a sequence having at or at least 80%, 85%, 90%, 91%, 92%, 93%, 94%, 95%, 96%, 97%, 98%, 99%, 99.5%, 99.9%, or 100% sequence identity to any of the foregoing. In some embodiments, the gRNA comprises a spacer sequence comprising SEQ ID NO: 499, a contiguous portion thereof of at least 14 nt (e.g. 14, 15, 16, 17, 18 or 19 nucleotides), or a sequence having at or at least 80%, 85%, 90%, 91%, 92%, 93%, 94%, 95%, 96%, 97%, 98%, 99%, 99.5%, 99.9%, or 100% sequence identity to any of the foregoing. In some embodiments, the gRNA further comprises a scaffold sequence. In some embodiments, the scaffold sequence comprises the sequence set forth in SEQ ID NO: 1454, or a sequence having at or at least 80%, 85%, 90%, 91%, 92%, 93%, 94%, 95%, 96%, 97%, 98%, 99%, 99.5%, 99.9%, or 100% sequence identity to SEQ ID NO: 1454. In some embodiments, the gRNA, including a spacer sequence and a scaffold sequence, comprises SEQ ID NO: 983, or a sequence having at or at least 80%, 85%, 90%, 91%, 92%, 93%, 94%, 95%, 96%, 97%, 98%, 99%, 99.5%, 99.9%, or 100% sequence identity to all or a portion thereof. In some embodiments, the gRNA targeting LHX8 or a DNA regulatory element thereof, is set forth in SEQ ID NO: 983. In some embodiments, a provided DNA-targeting system for epigenetic modification of LHX8 includes any of the above gRNAs complexed with a Cas protein, such as a Cas9 protein. In some embodiments, the Cas9 is a dSpCas9, such as a dSpCas9 set forth in SEQ ID NO: 1464.

[0210] In some embodiments, a gRNA provided herein targets NR5A2 or a DNA regulatory element thereof. The nuclear receptor subfamily 5, group A, member 2 (also known as liver receptor homolog-1, B1F, CPF, FTF, B1F2; LRH1; LRH-1; FTZ-F1; hB 1F-2; FTZ-F1beta) is encoded by the NR5A2 gene. The NR5A2 protein is a DNA-binding zinc finger transcription factor and is a member of the fushi tarazu factor-1 subfamily of orphan nuclear receptors. In some embodiments, the gRNA targets a target site in NR5A2 or a DNA regulatory element thereof that comprises SEQ ID NO: 16, a contiguous portion thereof of at least 14 nucleotides (e.g. 14, 15, 16, 17, 18 or 19 nucleotides), a complementary sequence of any of the foregoing, or a sequence having at or at least 80%, 85%, 90%, 91%, 92%, 93%, 94%, 95%, 96%, 97%, 98%, 99%, 99.5%, 99.9%, or 100% sequence identity to any of the foregoing. In some embodiments, the gRNA comprises a spacer sequence comprising SEQ ID NO: 500, a contiguous portion thereof of at least 14 nt (e.g. 14, 15, 16, 17, 18 or 19 nucleotides), or a sequence having at or at least 80%, 85%, 90%, 91%, 92%, 93%, 94%, 95%, 96%, 97%, 98%, 99%, 99.5%, 99.9%, or 100% sequence identity to any of the foregoing. In some embodiments, the gRNA further comprises a scaffold sequence. In some embodiments, the scaffold sequence comprises the sequence set forth in SEQ ID NO: 1454, or a sequence having at or at least 80%, 85%, 90%, 91%, 92%, 93%, 94%, 95%, 96%, 97%, 98%, 99%, 99.5%, 99.9%, or 100% sequence identity to SEQ ID NO: 1454. In some embodiments, the gRNA, including a spacer sequence and a scaffold sequence, comprises SEQ ID NO: 984, or a sequence having at or at least 80%, 85%, 90%, 91%, 92%, 93%, 94%, 95%, 96%, 97%, 98%, 99%, 99.5%, 99.9%, or 100% sequence identity to all or a portion thereof. In some embodiments, the gRNA targeting NR5A2 or a DNA regulatory element thereof, is set forth in SEQ ID NO: 984. In some embodiments, a provided DNA-targeting system for epigenetic modification of NR5A2 includes any of the above gRNAs complexed with a Cas protein, such as a Cas9 protein. In some embodiments, the Cas9 is a dSpCas9, such as a dSpCas9 set forth in SEQ ID NO: 1464.

[0211] In some embodiments, a gRNA provided herein targets PRDM16 or a DNA regulatory element thereof. PR domain containing 16 (also known as CMD1LL, KMT8F, LVNC8, MEL1, PFM13) is encoded by the PRDM16 gene. The PRDM16 protein is a zinc finger transcription factor. Overexpression of PRDM16 can attenuate proliferation. PRDM16 diminishes responsiveness to type I IFN to promote thermogenic and mitochondrial function in adipose cells. In some embodiments, the gRNA targets a target site in PRDM16 or a DNA regulatory element thereof that comprises SEQ ID NO: 17, a contiguous portion thereof of at least 14 nucleotides (e.g. 14, 15, 16, 17, 18 or 19 nucleotides), a complementary sequence of any of the foregoing, or a sequence having at or at least 80%, 85%, 90%, 91%, 92%, 93%, 94%, 95%, 96%, 97%, 98%, 99%, 99.5%, 99.9%, or 100% sequence identity to any of the foregoing. In some embodiments, the gRNA comprises a spacer sequence comprising SEQ ID NO: 501, a contiguous portion thereof of at least 14 nt (e.g. 14, 15, 16, 17, 18 or 19 nucleotides), or a sequence having at or at least 80%, 85%, 90%, 91%, 92%, 93%, 94%, 95%, 96%, 97%, 98%, 99%, 99.5%, 99.9%, or 100% sequence identity to any of the foregoing. In some embodiments, the gRNA further comprises a scaffold sequence. In some embodiments, the scaffold sequence comprises the sequence set forth in SEQ ID NO: 1454, or a sequence having at or at least 80%, 85%, 90%, 91%, 92%, 93%, 94%, 95%, 96%, 97%, 98%, 99%, 99.5%, 99.9%, or 100% sequence identity to SEQ ID NO: 1454. In some embodiments, the gRNA, including a spacer sequence and a scaffold sequence, comprises SEQ ID NO: 985, or a sequence having at or at least 80%, 85%, 90%, 91%, 92%, 93%, 94%, 95%, 96%, 97%, 98%, 99%, 99.5%, 99.9%, or 100% sequence identity to all or a portion thereof. In some embodiments, the gRNA targeting PRDM16 or a DNA regulatory element thereof, is set forth in SEQ ID NO: 985. In some embodiments, a provided DNA-targeting system for epigenetic modification of PRDM16 includes any of the above gRNAs complexed with a Cas protein, such as a Cas9 protein. In some embodiments, the Cas9 is a dSpCas9, such as a dSpCas9 set forth in SEQ ID NO: 1464.

[0212] In some embodiments, a gRNA provided herein targets RAX2 or a DNA regulatory element thereof. Retina and anterior neural fold homeobox 2 (also known as QRX, ARMD6, RAXL1, CORD11) is encoded by the RAX2 gene. The RAX2 encodes a homeodomain-containing protein that plays a role in eye development. In some embodiments, the gRNA targets a target site in RAX2 or a DNA regulatory element thereof that comprises SEQ ID NO: 18, a contiguous portion thereof of at least 14 nucleotides (e.g. 14, 15, 16, 17, 18 or 19 nucleotides), a complementary sequence of any of the foregoing, or a sequence having at or at least 80%, 85%, 90%, 91%, 92%, 93%, 94%, 95%, 96%, 97%, 98%, 99%, 99.5%, 99.9%, or 100% sequence identity to any of the foregoing. In some embodiments, the gRNA comprises a spacer sequence comprising SEQ ID NO: 502, a contiguous portion thereof of at least 14 nt (e.g. 14, 15, 16, 17, 18 or 19 nucleotides), or a sequence having at or at least 80%, 85%, 90%, 91%, 92%, 93%, 94%, 95%, 96%, 97%, 98%, 99%, 99.5%, 99.9%, or 100% sequence identity to any of the foregoing. In some embodiments, the gRNA further comprises a scaffold sequence. In some embodiments, the scaffold sequence comprises the sequence set forth in SEQ ID NO: 1454, or a sequence having at or at least 80%, 85%, 90%, 91%, 92%, 93%, 94%, 95%, 96%, 97%, 98%, 99%, 99.5%, 99.9%, or 100% sequence identity to SEQ ID NO: 1454. In some embodiments, the gRNA, including a spacer sequence and a scaffold sequence, comprises SEQ ID NO: 986, or a sequence having at or at least 80%, 85%, 90%, 91%, 92%, 93%, 94%, 95%, 96%, 97%, 98%, 99%, 99.5%, 99.9%, or 100% sequence identity to all or a portion thereof. In some embodiments, the gRNA targeting RAX2 or a DNA regulatory element thereof, is set forth in SEQ ID NO: 986. In some embodiments, a provided DNA-targeting system for epigenetic modification of RAX2 includes any of the above gRNAs complexed with a Cas protein, such as a Cas9 protein. In some embodiments, the Cas9 is a dSpCas9, such as a dSpCas9 set forth in SEQ ID NO: 1464.

[0213] In some embodiments, a gRNA provided herein targets SCML4 or a DNA regulatory element thereof. Scm polycomb group protein like 4 is encoded by the SCML4 gene and is a transcription repressor. In some embodiments, the gRNA targets a target site in SCML4 or a DNA regulatory element thereof that comprises SEQ ID NO: 19, a contiguous portion thereof of at least 14 nucleotides (e.g. 14, 15, 16, 17, 18 or 19 nucleotides), a complementary sequence of any of the foregoing, or a sequence having at or at least 80%, 85%, 90%, 91%, 92%, 93%, 94%, 95%, 96%, 97%, 98%, 99%, 99.5%, 99.9%, or 100% sequence identity to any of the foregoing. In some embodiments, the gRNA comprises a spacer sequence comprising SEQ ID NO: 503, a contiguous portion thereof of at least 14 nt (e.g. 14, 15, 16, 17, 18 or 19 nucleotides), or a sequence having at or at least 80%, 85%, 90%, 91%, 92%, 93%, 94%, 95%, 96%, 97%, 98%, 99%, 99.5%, 99.9%, or 100% sequence identity to any of the foregoing. In some embodiments, the gRNA further comprises a scaffold sequence. In some embodiments, the scaffold sequence comprises the sequence set forth in SEQ ID NO: 1454, or a sequence having at or at least 80%, 85%, 90%, 91%, 92%, 93%, 94%, 95%, 96%, 97%, 98%, 99%, 99.5%, 99.9%, or 100% sequence identity to SEQ ID NO: 1454. In some embodiments, the gRNA, including a spacer sequence and a scaffold sequence, comprises SEQ ID NO: 987, or a sequence having at or at least 80%, 85%, 90%, 91%, 92%, 93%, 94%, 95%, 96%, 97%, 98%, 99%, 99.5%, 99.9%, or 100% sequence identity to all or a portion thereof. In some embodiments, the gRNA targeting SCML4 or a DNA regulatory element thereof, is set forth in SEQ ID NO: 987. In some embodiments, a provided DNA-targeting system for epigenetic modification of SCML4 includes any of the above gRNAs complexed with a Cas protein, such as a Cas9 protein. In some embodiments, the Cas9 is a dSpCas9, such as a dSpCas9 set forth in SEQ ID NO: 1464.

[0214] In some embodiments, a gRNA provided herein targets SMAD1 or a DNA regulatory element thereof. SMAD family member 1 (also known as BSP1; JV41; BSP-1; JV4-1; MADH1; MADR1) is encoded by the SMAD1 gene. SMAD proteins are signal transducers and transcriptional modulators that mediate multiple signaling pathways. SMAD1 mediates the signals of the bone morphogenetic proteins (BMPs), which are involved in a range of biological activities including cell growth, apoptosis, morphogenesis, development and immune responses. In some embodiments, the gRNA targets a target site in SMAD1 or a DNA regulatory element thereof that comprises SEQ ID NO: 20, a contiguous portion thereof of at least 14 nucleotides (e.g. 14, 15, 16, 17, 18 or 19 nucleotides), a complementary sequence of any of the foregoing, or a sequence having at or at least 80%, 85%, 90%, 91%, 92%, 93%, 94%, 95%, 96%, 97%, 98%, 99%, 99.5%, 99.9%, or 100% sequence identity to any of the foregoing. In some embodiments, the gRNA comprises a spacer sequence comprising SEQ ID NO: 504, a contiguous portion thereof of at least 14 nt (e.g. 14, 15, 16, 17, 18 or 19 nucleotides), or a sequence having at or at least 80%, 85%, 90%, 91%, 92%, 93%, 94%, 95%, 96%, 97%, 98%, 99%, 99.5%, 99.9%, or 100% sequence identity to any of the foregoing. In some embodiments, the gRNA further comprises a scaffold sequence. In some embodiments, the scaffold sequence comprises the sequence set forth in SEQ ID NO: 1454, or a sequence having at or at least 80%, 85%, 90%, 91%, 92%, 93%, 94%, 95%, 96%, 97%, 98%, 99%, 99.5%, 99.9%, or 100% sequence identity to SEQ ID NO: 1454. In some embodiments, the gRNA, including a spacer sequence and a scaffold sequence, comprises SEQ ID NO: 988, or a sequence having at or at least 80%, 85%, 90%, 91%, 92%, 93%, 94%, 95%, 96%, 97%, 98%, 99%, 99.5%, 99.9%, or 100% sequence identity to all or a portion thereof. In some embodiments, the gRNA targeting SMAD1 or a DNA regulatory element thereof, is set forth in SEQ ID NO: 988. In some embodiments, a provided DNA-targeting system for epigenetic modification of SMAD1 includes any of the above gRNAs complexed with a Cas protein, such as a Cas9 protein. In some embodiments, the Cas9 is a dSpCas9, such as a dSpCas9 set forth in SEQ ID NO: 1464.

[0215] In some embodiments, a gRNA provided herein targets SOX6 or a DNA regulatory element thereof. SRY-box transcription factor 6 (also known as SOXD; HSSOX6; TOLCAS) is encoded by the SOX6 gene. SOX6 is a transcriptional activator that is required for normal development of the central nervous system, chondrogenesis and maintenance of cardiac and skeletal muscle cells. In some embodiments, the gRNA targets a target site in SOX6 or a DNA regulatory element thereof that comprises SEQ ID NO: 21, a contiguous portion thereof of at least 14 nucleotides (e.g. 14, 15, 16, 17, 18 or 19 nucleotides), a complementary sequence of any of the foregoing, or a sequence having at or at least 80%, 85%, 90%, 91%, 92%, 93%, 94%, 95%, 96%, 97%, 98%, 99%, 99.5%, 99.9%, or 100% sequence identity to any of the foregoing. In some embodiments, the gRNA comprises a spacer sequence comprising SEQ ID NO: 505, a contiguous portion thereof of at least 14 nt (e.g. 14, 15, 16, 17, 18 or 19 nucleotides), or a sequence having at or at least 80%, 85%, 90%, 91%, 92%, 93%, 94%, 95%, 96%, 97%, 98%, 99%, 99.5%, 99.9%, or 100% sequence identity to any of the foregoing. In some embodiments, the gRNA further comprises a scaffold sequence. In some embodiments, the scaffold sequence comprises the sequence set forth in SEQ ID NO: 1454, or a sequence having at or at least 80%, 85%, 90%, 91%, 92%, 93%, 94%, 95%, 96%, 97%, 98%, 99%, 99.5%, 99.9%, or 100% sequence identity to SEQ ID NO: 1454. In some embodiments, the gRNA, including a spacer sequence and a scaffold sequence, comprises SEQ ID NO: 989, or a sequence having at or at least 80%, 85%, 90%, 91%, 92%, 93%, 94%, 95%, 96%, 97%, 98%, 99%, 99.5%, 99.9%, or 100% sequence identity to all or a portion thereof. In some embodiments, the gRNA targeting SOX6 or a DNA regulatory element thereof, is set forth in SEQ ID NO: 989. In some embodiments, a provided DNA-targeting system for epigenetic modification of SOX6 includes any of the above gRNAs complexed with a Cas protein, such as a Cas9 protein. In some embodiments, the Cas9 is a dSpCas9, such as a dSpCas9 set forth in SEQ ID NO: 1464.

[0216] In some embodiments, a gRNA provided herein targets SUV39H1 or a DNA regulatory element thereof. Histone-lysine N-methyltransferase SUV39H1 (also known as MG44; KMT1A; SUV39H; H3-K9-HMTase 1) is encoded by the SUV39H1 gene. SUV39H1 encoded protein is a histone methyltransferase that trimethylates lysine 9 of histone H3, which results in transcriptional gene silencing. Loss of function of this gene disrupts heterochromatin formation and may cause chromosome instability. In some embodiments, the gRNA targets a target site in SUV39H1 or a DNA regulatory element thereof that comprises SEQ ID NO: 22, a contiguous portion thereof of at least 14 nucleotides (e.g. 14, 15, 16, 17, 18 or 19 nucleotides), a complementary sequence of any of the foregoing, or a sequence having at or at least 80%, 85%, 90%, 91%, 92%, 93%, 94%, 95%, 96%, 97%, 98%, 99%, 99.5%, 99.9%, or 100% sequence identity to any of the foregoing. In some embodiments, the gRNA comprises a spacer sequence comprising SEQ ID NO: 506, a contiguous portion thereof of at least 14 nt (e.g. 14, 15, 16, 17, 18 or 19 nucleotides), or a sequence having at or at least 80%, 85%, 90%, 91%, 92%, 93%, 94%, 95%, 96%, 97%, 98%, 99%, 99.5%, 99.9%, or 100% sequence identity to any of the foregoing. In some embodiments, the gRNA further comprises a scaffold sequence. In some embodiments, the scaffold sequence comprises the sequence set forth in SEQ ID NO: 1454, or a sequence having at or at least 80%, 85%, 90%, 91%, 92%, 93%, 94%, 95%, 96%, 97%, 98%, 99%, 99.5%, 99.9%, or 100% sequence identity to SEQ ID NO: 1454. In some embodiments, the gRNA, including a spacer sequence and a scaffold sequence, comprises SEQ ID NO: 990, or a sequence having at or at least 80%, 85%, 90%, 91%, 92%, 93%, 94%, 95%, 96%, 97%, 98%, 99%, 99.5%, 99.9%, or 100% sequence identity to all or a portion thereof. In some embodiments, the gRNA targeting SUV39H1 or a DNA regulatory element thereof, is set forth in SEQ ID NO: 990. In some embodiments, a provided DNA-targeting system for epigenetic modification of SUV39H1 includes any of the above gRNAs complexed with a Cas protein, such as a Cas9 protein. In some embodiments, the Cas9 is a dSpCas9, such as a dSpCas9 set forth in SEQ ID NO: 1464.

[0217] In some embodiments, a gRNA provided herein targets TFDP1 or a DNA regulatory element thereof. Transcription factor Dp-1 (also known as DP1; DILC; Dp-1; DRTF1) is encoded by the TFDP1 gene. TFDP1 encodes a member of a family of transcription factors that heterodimerize with E2F proteins to enhance their DNA-binding activity and promote transcription from E2F target genes. The encoded protein functions as part of this complex to control the transcriptional activity of numerous genes involved in cell cycle progression from G1 to S phase. In some embodiments, the gRNA targets a target site in TFDP1 or a DNA regulatory element thereof that comprises SEQ ID NO: 23, a contiguous portion thereof of at least 14 nucleotides (e.g. 14, 15, 16, 17, 18 or 19 nucleotides), a complementary sequence of any of the foregoing, or a sequence having at or at least 80%, 85%, 90%, 91%, 92%, 93%, 94%, 95%, 96%, 97%, 98%, 99%, 99.5%, 99.9%, or 100% sequence identity to any of the foregoing. In some embodiments, the gRNA comprises a spacer sequence comprising SEQ ID NO: 507, a contiguous portion thereof of at least 14 nt (e.g. 14, 15, 16, 17, 18 or 19 nucleotides), or a sequence having at or at least 80%, 85%, 90%, 91%, 92%, 93%, 94%, 95%, 96%, 97%, 98%, 99%, 99.5%, 99.9%, or 100% sequence identity to any of the foregoing. In some embodiments, the gRNA further comprises a scaffold sequence. In some embodiments, the scaffold sequence comprises the sequence set forth in SEQ ID NO: 1454, or a sequence having at or at least 80%, 85%, 90%, 91%, 92%, 93%, 94%, 95%, 96%, 97%, 98%, 99%, 99.5%, 99.9%, or 100% sequence identity to SEQ ID NO: 1454. In some embodiments, the gRNA, including a spacer sequence and a scaffold sequence, comprises SEQ ID NO: 991, or a sequence having at or at least 80%, 85%, 90%, 91%, 92%, 93%, 94%, 95%, 96%, 97%, 98%, 99%, 99.5%, 99.9%, or 100% sequence identity to all or a portion thereof. In some embodiments, the gRNA targeting TFDP1 or a DNA regulatory element thereof, is set forth in SEQ ID NO: 991. In some embodiments, a provided DNA-targeting system for epigenetic modification of TFDP1 includes any of the above gRNAs complexed with a Cas protein, such as a Cas9 protein. In some embodiments, the Cas9 is a dSpCas9, such as a dSpCas9 set forth in SEQ ID NO: 1464.

[0218] In some embodiments, a gRNA provided herein targets ZNF287 or a DNA regulatory element thereof. Zinc finger protein 287 (also known as ZSCAN45; ZKSCAN13) is encoded by the ZNF287 gene. ZNF287 encodes a member of the krueppel family of zinc finger proteins, suggesting a role as a transcription factor. In some embodiments, the gRNA targets a target site in ZNF287 or a DNA regulatory element thereof that comprises SEQ ID NO: 24, a contiguous portion thereof of at least 14 nucleotides (e.g. 14, 15, 16, 17, 18 or 19 nucleotides), a complementary sequence of any of the foregoing, or a sequence having at or at least 80%, 85%, 90%, 91%, 92%, 93%, 94%, 95%, 96%, 97%, 98%, 99%, 99.5%, 99.9%, or 100% sequence identity to any of the foregoing. In some embodiments, the gRNA comprises a spacer sequence comprising SEQ ID NO: 508, a contiguous portion thereof of at least 14 nt (e.g. 14, 15, 16, 17, 18 or 19 nucleotides), or a sequence having at or at least 80%, 85%, 90%, 91%, 92%, 93%, 94%, 95%, 96%, 97%, 98%, 99%, 99.5%, 99.9%, or 100% sequence identity to any of the foregoing. In some embodiments, the gRNA further comprises a scaffold sequence. In some embodiments, the scaffold sequence comprises the sequence set forth in SEQ ID NO: 1454, or a sequence having at or at least 80%, 85%, 90%, 91%, 92%, 93%, 94%, 95%, 96%, 97%, 98%, 99%, 99.5%, 99.9%, or 100% sequence identity to SEQ ID NO: 1454. In some embodiments, the gRNA, including a spacer sequence and a scaffold sequence, comprises SEQ ID NO: 992, or a sequence having at or at least 80%, 85%, 90%, 91%, 92%, 93%, 94%, 95%, 96%, 97%, 98%, 99%, 99.5%, 99.9%, or 100% sequence identity to all or a portion thereof. In some embodiments, the gRNA targeting ZNF287 or a DNA regulatory element thereof, is set forth in SEQ ID NO: 992. In some embodiments, a provided DNA-targeting system for epigenetic modification of ZNF287 includes any of the above gRNAs complexed with a Cas protein, such as a Cas9 protein. In some embodiments, the Cas9 is a dSpCas9, such as a dSpCas9 set forth in SEQ ID NO: 1464.

[0219] In some embodiments, a gRNA provided herein targets ZNF438 or a DNA regulatory element thereof. Zinc finger protein 438 (also known as bA330O11.1) is encoded by the ZNF438 gene. ZNF438 is a novel zinc finger gene. In some embodiments, the gRNA targets a target site in ZNF438 or a DNA regulatory element thereof that comprises SEQ ID NO: 25, a contiguous portion thereof of at least 14 nucleotides (e.g. 14, 15, 16, 17, 18 or 19 nucleotides), a complementary sequence of any of the foregoing, or a sequence having at or at least 80%, 85%, 90%, 91%, 92%, 93%, 94%, 95%, 96%, 97%, 98%, 99%, 99.5%, 99.9%, or 100% sequence identity to any of the foregoing. In some embodiments, the gRNA comprises a spacer sequence comprising SEQ ID NO: 509, a contiguous portion thereof of at least 14 nt (e.g. 14, 15, 16, 17, 18 or 19 nucleotides), or a sequence having at or at least 80%, 85%, 90%, 91%, 92%, 93%, 94%, 95%, 96%, 97%, 98%, 99%, 99.5%, 99.9%, or 100% sequence identity to any of the foregoing. In some embodiments, the gRNA further comprises a scaffold sequence. In some embodiments, the scaffold sequence comprises the sequence set forth in SEQ ID NO: 1454, or a sequence having at or at least 80%, 85%, 90%, 91%, 92%, 93%, 94%, 95%, 96%, 97%, 98%, 99%, 99.5%, 99.9%, or 100% sequence identity to SEQ ID NO: 1454. In some embodiments, the gRNA, including a spacer sequence and a scaffold sequence, comprises SEQ ID NO: 993, or a sequence having at or at least 80%, 85%, 90%, 91%, 92%, 93%, 94%, 95%, 96%, 97%, 98%, 99%, 99.5%, 99.9%, or 100% sequence identity to all or a portion thereof. In some embodiments, the gRNA targeting ZNF438 or a DNA regulatory element thereof, is set forth in SEQ ID NO: 993. In some embodiments, a provided DNA-targeting system for epigenetic modification of ZNF438 includes any of the above gRNAs complexed with a Cas protein, such as a Cas9 protein. In some embodiments, the Cas9 is a dSpCas9, such as a dSpCas9 set forth in SEQ ID NO: 1464.

[0220] In some embodiments, a gRNA provided herein targets ZNF681 or a DNA regulatory element thereof. Zinc finger protein 681 is encoded by the ZNF681 gene and is involved with nucleic acid binding and DNA-binding transcription factor activity. In some embodiments, the gRNA targets a target site in ZNF681 or a DNA regulatory element thereof that comprises SEQ ID NO: 26, a contiguous portion thereof of at least 14 nucleotides (e.g. 14, 15, 16, 17, 18 or 19 nucleotides), a complementary sequence of any of the foregoing, or a sequence having at or at least 80%, 85%, 90%, 91%, 92%, 93%, 94%, 95%, 96%, 97%, 98%, 99%, 99.5%, 99.9%, or 100% sequence identity to any of the foregoing. In some embodiments, the gRNA comprises a spacer sequence comprising SEQ ID NO: 510, a contiguous portion thereof of at least 14 nt (e.g. 14, 15, 16, 17, 18 or 19 nucleotides), or a sequence having at or at least 80%, 85%, 90%, 91%, 92%, 93%, 94%, 95%, 96%, 97%, 98%, 99%, 99.5%, 99.9%, or 100% sequence identity to any of the foregoing. In some embodiments, the gRNA further comprises a scaffold sequence. In some embodiments, the scaffold sequence comprises the sequence set forth in SEQ ID NO: 1454, or a sequence having at or at least 80%, 85%, 90%, 91%, 92%, 93%, 94%, 95%, 96%, 97%, 98%, 99%, 99.5%, 99.9%, or 100% sequence identity to SEQ ID NO: 1454. In some embodiments, the gRNA, including a spacer sequence and a scaffold sequence, comprises SEQ ID NO: 994, or a sequence having at or at least 80%, 85%, 90%, 91%, 92%, 93%, 94%, 95%, 96%, 97%, 98%, 99%, 99.5%, 99.9%, or 100% sequence identity to all or a portion thereof. In some embodiments, the gRNA targeting ZNF681 or a DNA regulatory element thereof, is set forth in SEQ ID NO: 994. In some embodiments, a provided DNA-targeting system for epigenetic modification of ZNF681 includes any of the above gRNAs complexed with a Cas protein, such as a Cas9 protein. In some embodiments, the Cas9 is a dSpCas9, such as a dSpCas9 set forth in SEQ ID NO: 1464.

[0221] In some embodiments, a gRNA provided herein targets ZNF853 or a DNA regulatory element thereof. Zinc finger protein 853 is encoded by the ZNF853 gene and is involved transcription regulation. In some embodiments, the gRNA targets a target site in ZNF853 or a DNA regulatory element thereof that comprises SEQ ID NO: 27, a contiguous portion thereof of at least 14 nucleotides (e.g. 14, 15, 16, 17, 18 or 19 nucleotides), a complementary sequence of any of the foregoing, or a sequence having at or at least 80%, 85%, 90%, 91%, 92%, 93%, 94%, 95%, 96%, 97%, 98%, 99%, 99.5%, 99.9%, or 100% sequence identity to any of the foregoing. In some embodiments, the gRNA comprises a spacer sequence comprising SEQ ID NO: 511, a contiguous portion thereof of at least 14 nt (e.g. 14, 15, 16, 17, 18 or 19 nucleotides), or a sequence having at or at least 80%, 85%, 90%, 91%, 92%, 93%, 94%, 95%, 96%, 97%, 98%, 99%, 99.5%, 99.9%, or 100% sequence identity to any of the foregoing. In some embodiments, the gRNA further comprises a scaffold sequence. In some embodiments, the scaffold sequence comprises the sequence set forth in SEQ ID NO: 1454, or a sequence having at or at least 80%, 85%, 90%, 91%, 92%, 93%, 94%, 95%, 96%, 97%, 98%, 99%, 99.5%, 99.9%, or 100% sequence identity to SEQ ID NO: 1454. In some embodiments, the gRNA, including a spacer sequence and a scaffold sequence, comprises SEQ ID NO: 995, or a sequence having at or at least 80%, 85%, 90%, 91%, 92%, 93%, 94%, 95%, 96%, 97%, 98%, 99%, 99.5%, 99.9%, or 100% sequence identity to all or a portion thereof. In some embodiments, the gRNA targeting ZNF853 or a DNA regulatory element thereof, is set forth in SEQ ID NO: 995. In some embodiments, a provided DNA-targeting system for epigenetic modification of ZNF853 includes any of the above gRNAs complexed with a Cas protein, such as a Cas9 protein. In some embodiments, the Cas9 is a dSpCas9, such as a dSpCas9 set forth in SEQ ID NO: 1464.

[0222] In some embodiments, a gRNA provided herein targets GATA3 or a DNA regulatory element thereof. In some embodiments, the gRNA targets a target site in GATA3 or a DNA regulatory element thereof that comprises SEQ ID NO: 141, a contiguous portion thereof of at least 14 nucleotides (e.g. 14, 15, 16, 17, 18 or 19 nucleotides), a complementary sequence of any of the foregoing, or a sequence having at or at least 80%, 85%, 90%, 91%, 92%, 93%, 94%, 95%, 96%, 97%, 98%, 99%, 99.5%, 99.9%, or 100% sequence identity to any of the foregoing. In some embodiments, the gRNA comprises a spacer sequence comprising SEQ ID NO: 625, a contiguous portion thereof of at least 14 nt (e.g. 14, 15, 16, 17, 18 or 19 nucleotides), or a sequence having at or at least 80%, 85%, 90%, 91%, 92%, 93%, 94%, 95%, 96%, 97%, 98%, 99%, 99.5%, 99.9%, or 100% sequence identity to any of the foregoing. In some embodiments, the gRNA further comprises a scaffold sequence. In some embodiments, the scaffold sequence comprises the sequence set forth in SEQ ID NO: 1454, or a sequence having at or at least 80%, 85%, 90%, 91%, 92%, 93%, 94%, 95%, 96%, 97%, 98%, 99%, 99.5%, 99.9%, or 100% sequence identity to SEQ ID NO: 1454. In some embodiments, the gRNA, including a spacer sequence and a scaffold sequence, comprises SEQ ID NO: 1109, or a sequence having at or at least 80%, 85%, 90%, 91%, 92%, 93%, 94%, 95%, 96%, 97%, 98%, 99%, 99.5%, 99.9%, or 100% sequence identity to all or a portion thereof. In some embodiments, the gRNA targeting GATA3 or a DNA regulatory element thereof, is set forth in SEQ ID NO: 1109. In some embodiments, a provided DNA-targeting system for epigenetic modification of GATA3 includes any of the above gRNAs complexed with a Cas protein, such as a Cas9 protein. In some embodiments, the Cas9 is a dSpCas9, such as a dSpCas9 set forth in SEQ ID NO: 1464.

[0223] In some embodiments, a gRNA provided herein targets KDM1A or a DNA regulatory element thereof. In some embodiments, the gRNA targets a target site in KDM1A or a DNA regulatory element thereof that comprises SEQ ID NO: 191, a contiguous portion thereof of at least 14 nucleotides (e.g. 14, 15, 16, 17, 18 or 19 nucleotides), a complementary sequence of any of the foregoing, or a sequence having at or at least 80%, 85%, 90%, 91%, 92%, 93%, 94%, 95%, 96%, 97%, 98%, 99%, 99.5%, 99.9%, or 100% sequence identity to any of the foregoing. In some embodiments, the gRNA comprises a spacer sequence comprising SEQ ID NO: 675, a contiguous portion thereof of at least 14 nt (e.g. 14, 15, 16, 17, 18 or 19 nucleotides), or a sequence having at or at least 80%, 85%, 90%, 91%, 92%, 93%, 94%, 95%, 96%, 97%, 98%, 99%, 99.5%, 99.9%, or 100% sequence identity to any of the foregoing. In some embodiments, the gRNA further comprises a scaffold sequence. In some embodiments, the scaffold sequence comprises the sequence set forth in SEQ ID NO: 1454, or a sequence having at or at least 80%, 85%, 90%, 91%, 92%, 93%, 94%, 95%, 96%, 97%, 98%, 99%, 99.5%, 99.9%, or 100% sequence identity to SEQ ID NO: 1454. In some embodiments, the gRNA, including a spacer sequence and a scaffold sequence, comprises SEQ ID NO: 1159, or a sequence having at or at least 80%, 85%, 90%, 91%, 92%, 93%, 94%, 95%, 96%, 97%, 98%, 99%, 99.5%, 99.9%, or 100% sequence identity to all or a portion thereof. In some embodiments, the gRNA targeting KDM1A or a DNA regulatory element thereof, is set forth in SEQ ID NO: 1159. In some embodiments, a provided DNA-targeting system for epigenetic modification of KDM1A includes any of the above gRNAs complexed with a Cas protein, such as a Cas9 protein. In some embodiments, the Cas9 is a dSpCas9, such as a dSpCas9 set forth in SEQ ID NO: 1464.

[0224] In some embodiments, a gRNA provided herein targets PRDM1 or a DNA regulatory element thereof. In some embodiments, the gRNA targets a target site in PRDM1 or a DNA regulatory element thereof that comprises SEQ ID NO: 269, a contiguous portion thereof of at least 14 nucleotides (e.g. 14, 15, 16, 17, 18 or 19 nucleotides), a complementary sequence of any of the foregoing, or a sequence having at or at least 80%, 85%, 90%, 91%, 92%, 93%, 94%, 95%, 96%, 97%, 98%, 99%, 99.5%, 99.9%, or 100% sequence identity to any of the foregoing. In some embodiments, the gRNA comprises a spacer sequence comprising SEQ ID NO: 753, a contiguous portion thereof of at least 14 nt (e.g. 14, 15, 16, 17, 18 or 19 nucleotides), or a sequence having at or at least 80%, 85%, 90%, 91%, 92%, 93%, 94%, 95%, 96%, 97%, 98%, 99%, 99.5%, 99.9%, or 100% sequence identity to any of the foregoing. In some embodiments, the gRNA further comprises a scaffold sequence. In some embodiments, the scaffold sequence comprises the sequence set forth in SEQ ID NO: 1454, or a sequence having at or at least 80%, 85%, 90%, 91%, 92%, 93%, 94%, 95%, 96%, 97%, 98%, 99%, 99.5%, 99.9%, or 100% sequence identity to SEQ ID NO: 1454. In some embodiments, the gRNA, including a spacer sequence and a scaffold sequence, comprises SEQ ID NO: 1237, or a sequence having at or at least 80%, 85%, 90%, 91%, 92%, 93%, 94%, 95%, 96%, 97%, 98%, 99%, 99.5%, 99.9%, or 100% sequence identity to all or a portion thereof. In some embodiments, the gRNA targeting PRDM1 or a DNA regulatory element thereof, is set forth in SEQ ID NO: 1237. In some embodiments, a provided DNA-targeting system for epigenetic modification of PRDM1 includes any of the above gRNAs complexed with a Cas protein, such as a Cas9 protein. In some embodiments, the Cas9 is a dSpCas9, such as a dSpCas9 set forth in SEQ ID NO: 1464.

### C. Other DNA-Targeting Domains

[0225] In some of any of the provided embodiments, the DNA-targeting domain comprises a zinc finger protein (ZFP); a transcription activator-like effector (TALE); a meganuclease; a homing endonuclease; or an I-SceI enzyme or a variant thereof. In some embodiments, the DNA-targeting domain comprises a catalytically inactive variant of any of the foregoing.

[0226] In some embodiments, a ZFP, a zinc finger DNA binding protein, or zinc finger DNA binding domain, is a protein, or a domain within a larger protein, that binds DNA in a sequence-specific manner through one or more zinc fingers, which are regions of amino acid sequence within the binding domain whose structure is stabilized through coordination of a zinc ion. The term zinc finger DNA binding protein is often abbreviated as zinc finger protein or ZFP. Among the ZFPs are artificial, or engineered, ZFPs, comprising ZFP domains targeting specific DNA sequences, typically 9-18 nucleotides long, generated by assembly of individual fingers. ZFPs include those in which a single finger domain is approximately 30 amino acids in length and contains an alpha helix containing two invariant histidine residues coordinated through zinc with two cysteines of a single beta turn, and having two, three, four, five, or six fingers. Generally, sequence-specificity of a ZFP may be altered by making amino acid substitutions at the four helix positions (−1, 2, 3, and 6) on a zinc finger recognition helix. Thus, for example, the ZFP or ZFP-containing molecule is non-naturally occurring, e.g., is engineered to bind to a target site of choice.

[0227] In some cases, the DNA-targeting system is or comprises a zinc-finger DNA binding domain fused to an effector domain. Some gene-specific engineered zinc fingers are available commercially. For example, a platform called CompoZr, for zinc-finger construction is available that provides specifically targeted zinc fingers for thousands of targets. See, e.g., Gaj et al., Trends in Biotechnology, 2013, 31 (7), 397-405. In some cases, commercially available zinc fingers are used, or are custom designed.

[0228] Transcription activator-like effectors (TALEs), are proteins naturally found in Xanthomonas bacteria. TALEs comprise a plurality of repeated amino acid sequences, each repeat having binding specificity for one base in a target sequence. Each repeat comprises a pair of variable residues in position 12 and 13 (repeat variable diresidue; RVD) that determine the nucleotide specificity of the repeat. In some embodiments, RVDs associated with recognition of the different nucleotides are HD for recognizing C, NG for recognizing T, NI for recognizing A, NN for recognizing G or A, NS for recognizing A, C, G or T, HG for recognizing T, IG for recognizing T, NK for recognizing G, HA for recognizing C, ND for recognizing C, HI for recognizing C, HN for recognizing G, NA for recognizing G, SN for recognizing G or A and YG for recognizing T, TL for recognizing A, VT for recognizing A or G and SW for recognizing A. In some embodiments, RVDs can be mutated towards other amino acid residues in order to modulate their specificity towards nucleotides A, T, C and G and in particular to enhance this specificity. Binding domains with similar modular base-per-base nucleic acid binding properties can also be derived from different bacterial species. These alternative modular proteins may exhibit more sequence variability than TALE repeats.

[0229] In some embodiments, a “TALE DNA binding domain” or “TALE” is a polypeptide comprising one or more TALE repeat domains/units. The repeat domains, each comprising a repeat variable diresidue (RVD), are involved in binding of the TALE to its cognate target DNA sequence. A single “repeat unit” (also referred to as a “repeat”) is typically 33-35 amino acids in length and exhibits at least some sequence homology with other TALE repeat sequences within a naturally occurring TALE protein. TALE proteins may be designed to bind to a target site using canonical or non-canonical RVDs within the repeat units. See, e.g., U.S. Pat. Nos. 8,586,526 and 9,458,205.

[0230] In some embodiments, a TALE is a fusion protein comprising a nucleic acid binding domain derived from a TALE and an effector domain. In some embodiments, one or more sites in the FXN locus can be targeted by engineered TALEs.

[0231] Zinc finger and TALE DNA-targeting domains can be engineered to bind to a predetermined nucleotide sequence, for example via engineering (altering one or more amino acids) of the recognition helix region of a naturally occurring zinc finger protein, by engineering of the amino acids in a TALE repeat involved in DNA binding (the repeat variable diresidue or RVD region), or by systematic ordering of modular DNA-targeting domains, such as TALE repeats or ZFP domains. Therefore, engineered zinc finger proteins or TALE proteins are proteins that are non-naturally occurring. Non-limiting examples of methods for engineering zinc finger proteins and TALEs are design and selection. A designed protein is a protein not occurring in nature whose design/composition results principally from rational criteria. Rational criteria for design include application of substitution rules and computerized algorithms for processing information in a database storing information of existing ZFP or TALE designs (canonical and non-canonical RVDs) and binding data. See, for example, U.S. Pat. Nos. 9,458,205; 8,586,526; 6,140,081; 6,453,242; and 6,534,261; see also WO 98/53058; WO 98/53059; WO 98/53060; WO 02/016536 and WO 03/016496.

### D. Effector Domains

[0232] In some aspects, the DNA-targeting systems provided herein further include one or more effector domains. In some embodiments, provided herein is a DNA-targeting system comprising a fusion protein comprising: (a) a DNA-targeting domain capable of being targeted to a target site in a gene or regulatory DNA element thereof, such as any described above, and (b) at least one effector domain. In some aspects, the effector domain is capable of reducing transcription of the gene, i.e. comprises a transcriptional repressor domain. In some aspects, the effector domain comprises a transcription repressor domain.

[0233] In some aspects, the effector domain, represses, induces, catalyzes, or leads to reduced transcription of a gene when ectopically recruited to the gene or DNA regulatory element thereof.

[0234] In some embodiments, the effector domain induces, catalyzes or leads to transcription repression, transcription co-repression, transcription repression, transcription factor release, polymerization, histone modification, histone acetylation, histone deacetylation, nucleosome remodeling, chromatin remodeling, heterochromatin formation, proteolysis, ubiquitination, deubiquitination, phosphorylation, dephosphorylation, splicing, nucleic acid association, DNA methylation, DNA demethylation, histone methylation, histone demethylation, or DNA base oxidation. In some embodiments, the effector domain represses, induces, catalyzes or leads to transcription repression or transcription co-repression. In some embodiments, the effector domain induces transcription repression. In some embodiments, the effector domain has one of the aforementioned activities itself (i.e. acts directly). In some embodiments, the effector domain recruits and/or interacts with a polypeptide domain that has one of the aforementioned activities (i.e. acts indirectly).

[0235] Gene expression of endogenous mammalian genes, such as human genes, can be achieved by targeting a fusion protein comprising a DNA-targeting domain, such as a dCas9, and an effector domain to mammalian genes or regulatory DNA elements thereof (e.g. a promoter or enhancer) via one or more gRNAs. Any of a variety of effector domains are known and can be used in accord with the provided embodiments. Repression of target genes by such effector domains as Cas fusion proteins with a variety of Cas molecules and the transcriptional repressor domains, are described, for example, in WO2021226077, WO2017180915, WO2014197748, WO2014093655, US20190127713, WO2013176772, Adli, M. Nat. Commun. 9, 1911 (2018), Urrutia, R. Genome Biol. 4, 231 (2003), Groner, A. C. et al. PLOS Genet. 6, e1000869 (2010), Liu, X. S. et al. Cell 167, 233-247.e17 (2016), and Lei, Y. et al. Nat. Commun. 8, 16026 (2017).

[0236] In some embodiments, the effector domain may comprise Kruppel associated box, such as a KRAB domain, ERF repressor domain, MXI1 repressor domain, SID4X repressor domain, Mad-SID repressor domain, LSD1, a DNMT family protein domain (e.g. DNMT3A or DNMT3B), a fusion of one or more DNMT family proteins or domains thereof (e.g. DNMT3A/L, which comprises a fusion of DNMT3A and DNMT3L domains). In some embodiments, the fusion protein may be DNMT3A/L-dCas9-KRAB. In some embodiments, the fusion protein may be KRAB-dCas9-DNMT3A/L. For example, the fusion protein may be dCas9-KRAB a partially or fully functional fragment or domain thereof, or a combination of any of the foregoing.

[0237] In some embodiments, the effector domain comprises a transcriptional repressor domain described in WO 2021/226077.

[0238] In some embodiments, the effector domain comprises at least one KRAB domain, or a variant thereof. The KRAB-containing zinc finger proteins make up the largest family of transcriptional repressors in mammals. The Krüppel associated box (KRAB) domain is a type of transcriptional repressor domain present in many zinc finger protein-based transcription factors. The KRAB domain comprises charged amino acids and can be divided into sub-domains A and B. The KRAB domain recruits corepressors KAP1 (KRAB-associated protein-1), epigenetic readers such as heterochromatin protein 1 (HP1), and other chromatin modulators to perform transcriptional repression through heterochromatin formation. KRAB-mediated gene repression is associated with loss of histone H3-acetylation and an increase in H3 lysine 9 trimethylation (H3K9me3) at the repressed gene promoters. KRAB domains, including in dCas fusion proteins, have been described, for example, in WO2017180915, WO2014197748, US20190127713, WO2014093655, WO2013176772, Urrutia, R. KRAB-containing zinc-finger repressor proteins. Genome Biol. 4, 231 (2003), Groner, A. C. et al. KRAB-zinc finger proteins and KAP1 can mediate long-range transcriptional repression through heterochromatin spreading. PLOS Genet. 6, e1000869 (2010). In some embodiments, the effector domain comprises at least one KRAB domain or a variant thereof. An exemplary KRAB domain is set forth in SEQ ID NO: 1465. In some embodiments, the effector domain comprises the sequence set forth in SEQ ID NO: 1465, or a portion thereof, or an amino acid sequence that has at least 90%, 91%, 92%, 93%, 94%, 95%, 96%, 97%, 98%, or 99% sequence identity to any of the foregoing.

[0239] In some embodiments, the effector domain comprises at least one ERF repressor domain, or a variant thereof. ERF (ETS2 repressor factor) is a strong transcriptional repressor that comprises a conserved ets-DNA-binding domain, and represses transcription via a distinct domain at the carboxyl-terminus of the protein. ERF repressor domains, including in dCas fusion proteins, have been described, for example, in WO2017180915, WO2014197748, WO2013176772, Mavrothalassitis, G., Ghysdael, J. Proteins of the ETS family with transcriptional repressor activity. Oncogene 19, 6524-6532 (2000). In some embodiments, the effector domain comprises at least one ERF repressor domain or a variant thereof. An exemplary ERF repressor domain is set forth in SEQ ID NO:1488. In some embodiments, the effector domain comprises the sequence set forth in SEQ ID NO: 1488, or a portion thereof, or an amino acid sequence that has at least 90%, 91%, 92%, 93%, 94%, 95%, 96%, 97%, 98%, or 99% sequence identity to any of the foregoing.

[0240] In some embodiments, the effector domain comprises at least one MXI1 domain, or a variant thereof. The MXI1 domain functions by antagonizing the myc transcriptional activity by competing for binding to myc-associated factor x (MAX). MXI1 domains, including in dCas fusion proteins, have been described, for example, in WO2017180915, WO2014197748, US20190127713. In some embodiments, the effector domain comprises at least one MXI1 domain or a variant thereof. An exemplary MXI1 domain is set forth in SEQ ID NO:1489. In some embodiments, the effector domain comprises the sequence set forth in SEQ ID NO: 1489, or a portion thereof, or an amino acid sequence that has at least 90%, 91%, 92%, 93%, 94%, 95%, 96%, 97%, 98%, or 99% sequence identity to any of the foregoing.

[0241] In some embodiments, the effector domain comprises at least one SID4X domain, or a variant thereof. The mSin3 interacting domain (SID) is present on different transcription repressor proteins. It interacts with the paired amphipathic alpha-helix 2 (PAH2) domain of mSin3, a transcriptional repressor domain that is attached to transcription repressor proteins such as the mSin3 A corepressor. A dCas9 molecule can be fused to four concatenated mSin3 interaction domains (SID4X). SID domains, including in dCas fusion proteins, have been described, for example, in WO2017180915, WO2014197748, WO2014093655. In some embodiments, the effector domain comprises at least one SID domain or a variant thereof. An exemplary SID domain is set forth in SEQ ID NO:1490. In some embodiments, the effector domain comprises the sequence set forth in SEQ ID NO: 1490, or a portion thereof, or an amino acid sequence that has at least 90%, 91%, 92%, 93%, 94%, 95%, 96%, 97%, 98%, or 99% sequence identity to any of the foregoing.

[0242] In some embodiments, the effector domain comprises at least one MAD domain, or a variant thereof. The MAD family proteins, Mad1, Mxi1, Mad3, and Mad4, belong to the basic helix-loop-helix-zipper class and contain a conserved N terminal region (termed Sin3 interaction domain (SID)) necessary for repressional activity. MAD-SID domains, including in dCas fusion proteins, have been described, for example, in WO2017180915, WO2014197748, WO2013176772. In some embodiments, the effector domain comprises at least one MAD-SID domain or a variant thereof. An exemplary MAD-SID domain is set forth in SEQ ID NO:1491. In some embodiments, the effector domain comprises the sequence set forth in SEQ ID NO: 1491, or a portion thereof, or an amino acid sequence that has at least 90%, 91%, 92%, 93%, 94%, 95%, 96%, 97%, 98%, or 99% sequence identity to any of the foregoing.

[0243] In some embodiments, the effector domain may comprise a LSD1 domain. LSD1 (also known as Lysine-specific histone demethylase 1A) is a histone demethylase that can demethylate lysine residues of histone H3, thereby acting as a coactivator or a corepressor, depending on the context. LSD1, including in dCas fusion proteins, has been described, for example, in WO 2013/176772, WO 2014/152432, and Kearns, N. A. et al. Nat. Methods. 12 (5): 401-403 (2015). An exemplary LSD1 polypeptide is set forth in SEQ ID NO: 1494 In some embodiments, the effector domain comprises the sequence set forth in SEQ ID NO: 1494, or a portion thereof, or an amino acid sequence that has at least 90%, 91%, 92%, 93%, 94%, 95%, 96%, 97%, 98%, or 99% sequence identity to any of the foregoing.

[0244] In some embodiments, the effector domain is from a DNMT3 or is a portion or a functionally active variant thereof with DNA methyltransferase activity. The DNMT3A and DNMT3B are two DNA methyltransferases that catalyze de novo methylation, which depending on the site may be associated with transcriptional repression. DNMTs, such as DNMT3s, mediate transfer of a methyl group from the universal methyl donor, S-adenosyl-L-methionine (SAM), to the 5-position of cytosine residues. In some aspects, these DNMT3 DNA methyltransferases induce de novo methylation of a cytosine base to methylated 5-methylcytosine. DNMT3, including in dCas fusion proteins, have been described, for example, in US20190127713, Liu, X. S. et al. Cell 167, 233-247.e17 (2016), Lei, Y. et al. Nat. Commun. 8, 16026 (2017). DNMT3 proteins, such as DNMT3A and DNMT3B, contain an N-terminal part that is naturally involved in regulatory activity and targeting, and a C-terminal catalytic domain termed the MTase C5-type domain. In some embodiments, an effector domain in embodiments provided herein includes a catalytically active portion of a DNMT3A or a DNMT3B that contains a catalytically active C-terminal domain. In particular, isolated catalytic domains of DNMT3a and DNMT3b are catalytically active (see e.g. Gowher and Jeltsch (2002) J. Biol. Chem., 277:20409). In some embodiments, the effector domain comprises at least one DNMT3 domain or a variant thereof. An exemplary DNMT3A domain is set forth in SEQ ID NO: 1492. An exemplary DNMT3B domain is set forth in SEQ ID NO:1493. In some embodiments, the effector domain comprises the sequence set forth in SEQ ID NO: 1492 or SEQ ID NO: 1493, or a portion thereof, or an amino acid sequence that has at least 90%, 91%, 92%, 93%, 94%, 95%, 96%, 97%, 98%, or 99% sequence identity to any of the foregoing.

[0245] In some embodiments, the DNMT3 domain may be an effector domain of DNMT3A or DNMT3B that is catalytically active. In some embodiments, the effector domain may be the full-length of DNMT3A or DNMT3B or a catalytically active portion thereof. In some embodiments, the effector domain is a catalytically active portion that is less than the full-length sequence of DNMT3A or DNMT3B. In some embodiments, a catalytically active portion is a contiguous sequence of amino acids that confers DNA methyltransferase activity, such as by mediating methylation of a cytosine base to methylated 5-methylcytosine. In some embodiments, the contiguous sequence of amino acids is a contiguous C-terminal portion of a DNMT3 protein, such as DNMT3A, or DNMT3B, that is from 280 amino acids to 330 amino acids in length. In some embodiments, the contiguous portion is 280 amino acids, 290 amino acids, 300 amino acids, 310 amino acids, 320 amino acids, or 330 amino acids in length, or is a length of any value between any of the foregoing. In some embodiments, a catalytically active portion of a DNMT, such as a DNMT3, includes a SAM-dependent MTase C5-type domain. In some embodiments, the DNMT3 domain, such as a domain of DNMT3A or DNMT3B, is of human origin.

[0246] In some embodiments, the effector domain is from DNMT3A or a catalytically active portion or variant thereof. An exemplary DNMT3A domain is set forth in SEQ ID NO:1492, or is a catalytically active portion thereof, or is an amino acid sequence that has at least 90%, 91%, 92%, 93%, 94%, 95%, 96%, 97%, 98%, or 99% sequence identity to SEQ ID NO: 1492 or the catalytically active portion thereof that exhibits DNA methyltransferase activity. In some embodiments, the catalytically active portion is a contiguous portion of amino acids of SEQ ID NO: 1492 that includes the SAM-dependent MTase C5-type domain (e.g. corresponding to amino acids 634-912 of SEQ ID NO:1492. In some embodiments, the contiguous sequence of amino acids of SEQ ID NO: 604 includes at least 250 amino acids, 275 amino acids, 300 amino acids or 325 amino acids, or any value between any of the foregoing. In some embodiments, the contiguous sequence of amino acids is a contiguous portion of SEQ ID NO:1492 that includes amino acids 634-912 and is from 280 amino acids to 330 amino acids in length. In some embodiments, the contiguous portion is 280 amino acids, 290 amino acids, 300 amino acids, 310 amino acids, 320 amino acids, or 330 amino acids in length, or is a length of any value between any of the foregoing.

[0247] In some embodiments, the effector domain is from DNMT3B or a catalytically active portion or variant thereof that exhibits DNA methyltransferase activity. An exemplary DNMT3B domain is set forth in SEQ ID NO:1493, or is a catalytically active portion thereof, or is an amino acid sequence that has at least 90%, 91%, 92%, 93%, 94%, 95%, 96%, 97%, 98%, or 99% sequence identity to SEQ ID NO:1493 or the catalytically active portion thereof that exhibits DNA methyltransferase activity. In some embodiments, the catalytically active portion is a contiguous portion of amino acids of SEQ ID NO:1493 that includes the SAM-dependent MTase C5-type domain (e.g. corresponding to amino acids 575-853 of SEQ ID NO:1493). In some embodiments, the contiguous sequence of amino acids of SEQ ID NO: 1493 includes at least 250 amino acids, 275 amino acids, 300 amino acids or 325 amino acids, or any value between any of the foregoing. In some embodiments, the contiguous sequence of amino acids is a contiguous portion of SEQ ID NO:1493 that includes amino acids 575-853 and is from 280 amino acids to 330 amino acids in length. In some embodiments, the contiguous portion is 280 amino acids, 290 amino acids, 300 amino acids, 310 amino acids, 320 amino acids, or 330 amino acids in length, or is a length of any value between any of the foregoing.

[0248] Any of a variety of assays are known to assess or monitor methyltransferase (MTase) activity. In some embodiments, exemplary assays to assess DNA methyltransferase activity include, but are not limited to, radio DNA MTase assays, colorimetric DNA MTase activity assays, fluorescent DNA MTase activity assays, chemiluminescent/bioluminescent DNA MTase activity assays, electrochemical DNA MTase activity assays, and elctrogenerated chemiluminescence (ECL) DNA MTase activity assays. Exemplary assays are described in Poh et al. Theranostics, 2016, 6:369-391; Li et al., Methods Appl. Fluoresc., 2017, 5:012002; Deng et al., Anal Chem., 2014, 86:2117-23; and Ma et al. J Mater Chem B., 2020, 8:3488-3501.

[0249] In some embodiments, the effector domain includes a DNMT3L, or a portionor a variant of DNMT3L or the portion thereof. DNMT3L (DNA (cytosine-5)-methyltransferase 3-like) is a catalytically inactive regulatory factor of DNA methyltransferases that can either promote or inhibit DNA methylation depending on the context. DNMT3L is essential for the function of DNMT3A and DNMT3B; DNMT3L interacts with DNMT3A and DNMT3B and enhances their catalytic activity. For instance, DNMT3L interacts with the catalytic domain of DNMT3A or DNMT3B to form a heterodimer, demonstrating that DNMT3L has dual functions of binding an unmethylated histone tail and activating DNA methyltransferase. In some embodiments, reference to a portion or variant of a DNMT3L for purposes herein refers to a sufficient C-terminal sequence portion of DNMT3L that interacts with the catalytic domain of DNMT3A or DNMT3B and is able to stimulate or promote DNA methyltransferase activity of DNMT3A or DNMT3B (see e.g. Jia et al. Nature, 2007, 449:248-251; Gowher et al. J. Biol. Chem., 2005, 280:13341-13348). In some embodiments, the DNMT3L or portion thereof is of animal origin. In some embodiments, the domain from DNMT3L is of murine origin. In some embodiments, the domain from DNMT3L is of human origin.

[0250] In some embodiments, the DNMT3L domain is a DNMT3L, or a C-terminal portion or variant thereof, that interacts with the catalytic domain of DNMT3A to form a heterodimer to provide for a more active DNA methyltransferase. In some embodiments, the effector domain is a fusion domain of a DNMT3A domain and the DNMT3L domain (DNMT3A/3L).

[0251] In some embodiments, the DNMT3L domain is a DNMT3L, or a C-terminal portion or variant thereof, that interacts with the catalytic domain of DNMT3B to form a heterodimer to provide for a more active DNA methyltransferase. In some embodiments, the effector domain is a fusion domain of a DNMT3B domain and the DNMT3L domain (DNMT3B/3L).

[0252] In some embodiments, the DNMT3L domain is a C-terminal portion of DNMT3L composed of a contiguous C-terminal portion of the full-length DNMT3L that does not include the N-terminal cysteine-rich ATRX-Dnmt3-Dnmt3L (ADD) domain (e.g. corresponding to residues 41-73 of SEQ ID NO: 1495 or 75-207 of the sequence set forth in SEQ ID NO:1521). In some embodiments, the DNMT3L domain is a contiguous C-terminal portion of DNMT3L that is less than 220 amino acids in length, such as between 100 and 215 amino acids, such as at or about 100, 110, 120, 130, 140, 150, 160, 170, 180, 190, 200, 210 or 215 amino acids in length, or a length between a value of any of the foregoing. In some embodiments, the DNMT3L domain is a contiguous C-terminal portion of DNMT3L that is 205, 206, 207, 208, 209, 210, 211, 212, 213, 214 or 215 amino acids in length.

[0253] An exemplary DNMT3L domain is set forth in SEQ ID NO:1521, or is a portion thereof, or is an amino acid sequence that has at least 90%, 91%, 92%, 93%, 94%, 95%, 96%, 97%, 98%, or 99% sequence identity to SEQ ID NO: 1521 or the portion thereof. In some embodiments, the DNMT3L domain is a contiguous C-terminal portion of the full-length DNMT3L set forth in SEQ ID NO: 1521 that does not include the N-terminal cysteine-rich ATRX-Dnmt3-Dnmt3L (ADD) domain (corresponding to residues 75-207 of the sequence set forth in SEQ ID NO:1521). In some embodiments, the DNMT3L domain is a contiguous C-terminal portion of the full-length DNMT3L set forth in SEQ ID NO: 1521 that is less than 220 amino acids in length, such as between 100 and 215 amino acids, such as at or about 100, 110, 120, 130, 140, 150, 160, 170, 180, 190, 200, 210 or 215 amino acids in length, or a length between a value of any of the foregoing. In some embodiments, the DNMT3L domain is a contiguous C-terminal portion of the full-length DNMT3L set forth in SEQ ID NO: 1521 that is 205, 206, 207, 208, 209, 210, 211, 212, 213, 214 or 215 amino acids in length.

[0254] In some embodiments, the DNMT3L domain is set forth in SEQ ID NO:1517, or is a portion thereof, or is an amino acid sequence that has at least 90%, 91%, 92%, 93%, 94%, 95%, 96%, 97%, 98%, or 99% sequence identity to SEQ ID NO:1517. In some embodiments, the DNMT3L domain is set forth in SEQ ID NO:1517. In some embodiments, the DNMT3L domain does not contain an N-terminal methionine, such as set forth in SEQ ID NO: 1517.

[0255] In some embodiments, the DNMT3L domain is a human or humanized DNMT3L. Corresponding sequences of human are highly homologous to the Dnmt3L derived from mouse and have a sequence identity of at least 90% with the murine sequence. It is within the level of a skilled artisan to humanize a non-human sequence of a DNMT3L domain, such as a domain of a murine DNMT3L. In some embodiments, the effector domain includes a DNMT3L domain that is a humanized variant of the murine DMT3L set forth in SEQ ID NO:1521 or a portion thereof that is able to interact with DNMT3A or DNMT3A. In some embodiments, the effector domain includes a DNMT3L domain that is a humanized variant of the murine C-terminal portion of DNMT3L set forth in SEQ ID NO:1517.

[0256] An exemplary DNMT3L domain of human origin is set forth in SEQ ID NO:1495, or is a portion thereof, or is an amino acid sequence that has at least 90%, 91%, 92%, 93%, 94%, 95%, 96%, 97%, 98%, or 99% sequence identity to SEQ ID NO:1495 or the portion thereof. In some embodiments, the DNMT3L domain is a contiguous C-terminal portion of the full-length DNMT3L set forth in SEQ ID NO: 1495 that does not include the N-terminal cysteine-rich ATRX-Dnmt3-Dnmt3L (ADD) domain (corresponding to residues 41-73 of the sequence set forth in SEQ ID NO:1495). In some embodiments, the DNMT3L domain is a contiguous C-terminal portion of the full-length DNMT3L set forth in SEQ ID NO: 1495 that is less than 220 amino acids in length, such as between 100 and 215 amino acids, such as at or about 100, 110, 120, 130, 140, 150, 160, 170, 180, 190, 200, 210 or 215 amino acids in length, or a length between a value of any of the foregoing. In some embodiments, the DNMT3L domain is a contiguous C-terminal portion of the full-length DNMT3L set forth in SEQ ID NO: 1495 that is 205, 206, 207, 208, 209, 210, 211, 212, 213, 214 or 215 amino acids in length.

[0257] In some embodiments, the DNMT3L domain comprises the sequence set forth in SEQ ID NO:1519, or is a portion thereof, or is an amino acid sequence that has at least 90%, 91%, 92%, 93%, 94%, 95%, 96%, 97%, 98%, or 99% sequence identity to SEQ ID NO:1519. In some embodiments, the DNMT3L domain is set forth in SEQ ID NO:1519. In some embodiments, the DNMT3L domain contains an N-terminal methionine.

[0258] In some embodiments, the effector domain comprises a fusion of DNMT3A and DNMT3L (DNMT3A/L). The fusion protein contains DNMT3A and DNMT3L domains that can be any as described above. In some embodiments, the fusion protein contains the DNMT3A domain set forth in SEQ ID NO: 1514 and the DNMT3L domain set forth in SEQ ID NO: 1521, arranged in any order. In some embodiments, the fusion protein contains the DNMT3A domain set forth in SEQ ID NO: 1514 and the DNMT3L domain set forth in SEQ ID NO:1517, arranged in any order. In some embodiments, the fusion protein contains the DNMT3A domain set forth in SEQ ID NO:1514 and the DNMT3L domain set forth in SEQ ID NO:1519, arranged in any order. In some embodiments, the fusion protein contains the DNMT3A domain set forth in SEQ ID NO: 1518 and the DNMT3L domain set forth in SEQ ID NO: 1521, arranged in any order. In some embodiments, the fusion protein contains the DNMT3A domain set forth in SEQ ID NO: 1518 and the DNMT3L domain set forth in SEQ ID NO:1517, arranged in any order. In some embodiments, the fusion protein contains the DNMT3A domain set forth in SEQ ID NO: 1518 and the DNMT3L domain set forth in SEQ ID NO:1519, arranged in any order. In some embodiments, the DNMT3A and DNMT3L domains present in a provided fusion protein are separated from each other in the fusion protein by an intervening sequence, such as the DNA-binding domain, another effector domain or a linker. In some embodiments, the domains are either directly linked to each other or they are linked via a linker, such as a peptide linker. In some embodiments, the DNMT3A and DNMT3L domains are connected as a fusion domain via a linker that connects the DNMT3A domain and the DNMT3L domain. Exemplary linkers are described herein. In some embodiments, the linker is the linker set forth in SEQ ID NO: 1520.

[0259] An exemplary DNMT3A/L fusion domain is set forth in SEQ ID NO:1511. In some embodiments, the effector domain comprises the sequence set forth in SEQ ID NO:1511, or an amino acid sequence that has at least 90%, 91%, 92%, 93%, 94%, 95%, 96%, 97%, 98%, or 99% sequence identity to SEQ ID NO:1511 and exhibits DNA methyltransferase activity.

### E. Fusion Proteins

[0260] In some aspects, the DNA-targeting systems provided herein are fusion proteins. In some embodiments, provided herein is a DNA-targeting system that is a fusion protein comprising: (a) a DNA-targeting domain capable of being targeted to a target site in a gene or regulatory DNA element thereof, and (b) at least one effector domain. In some aspects, the fusion protein comprises at least one of any of the DNA-targeting domains described herein, and at least one of any of the effector domains described herein. For instance, in some embodiments, the fusion protein contains a CRISPR-Cas DNA-targeting domain, such as described in Section II.B, and at least one effector domain described herein. In some aspects, the fusion protein is targeted to a target site in a gene or regulatory element thereof, and leads to reduced or repressed transcription of the gene.

[0261] In some embodiments, the DNA-targeting domain and effector domain of the fusion protein are heterologous, i.e. the domains are from different species, or at least one of the domains is not found in nature. In some aspects, the fusion protein is an engineered fusion protein, i.e. the fusion protein is not found in nature.

[0262] In some embodiments, the at least one effector domain is fused to the N-terminus, the C-terminus, or both the N-terminus and the C-terminus, of the DNA-targeting domain or a component thereof. The at least one effector domain may be fused to the DNA-targeting domain directly, or via any intervening amino acid sequence, such as a linker sequence or a nuclear localization sequence (NLS).

[0263] In some embodiments, the fusion protein comprises one or more linkers. In some embodiments, the one or more linkers connect the DNA-targeting domain or a component thereof to the at least one effector domain. A linker may be included anywhere in the polypeptide sequence of the fusion protein, for example, between the effector domain and the DNA-targeting domain or a component thereof. A linker may be of any length and designed to promote or restrict the mobility of components in the fusion protein. A linker may comprise any amino acid sequence of about 2 to about 100, about 5 to about 80, about 10 to about 60, or about 20 to about 50 amino acids. A linker may comprise an amino acid sequence of at least about 2, 3, 4, 5, 10, 15, 20, 25, or 30 amino acids. A linker may comprise an amino acid sequence of less than about 100, 90, 80, 70, 60, 50, or 40 amino acids. A linker may include sequential or tandem repeats of an amino acid sequence that is 2 to 20 amino acids in length. Linkers may be rich in amino acids glycine (G), serine(S), and/or alanine (A). Linkers may include, for example, a GS linker. An exemplary GS linker is represented by the sequence GGGGS (SEQ ID NO: 1468), or the formula (GGGGS)n, wherein n is an integer that represents the number of times the GGGGS sequence is repeated (e.g. between 1 and 10 times). The number of times a linker sequence is repeated can be adjusted to optimize the linker length and achieve appropriate separation of the functional domains. Other examples of linkers may include, for example, GGGGG (SEQ ID NO: 1469), GGAGG (SEQ ID NO: 1470), GGGGSSS (SEQ ID NO: 1471), or GGGGAAA (SEQ ID NO: 1472).

[0264] In some embodiments, the DNA-targeting system comprises one or more nuclear localization signals (NLS). In some embodiments, a fusion protein described herein comprises one or more nuclear localization sequences (NLSs), such as about or more than about 1, 2, 3, 4, 5, 6, 7, 8, 9, 10, or more NLSs. When more than one NLS is present, each may be selected independently of the others, such that a single NLS may be present in more than one copy and/or in combination with one or more other NLSs present in one or more copies. Non-limiting examples of NLSs include an NLS sequence derived from: the NLS of the SV40 virus large T-antigen, having the amino acid sequence PKKKRKV (SEQ ID NO: 1473); the NLS from nucleoplasmin (e.g. the nucleoplasmin bipartite NLS with the sequence KRPAATKKAGQAKKKK (SEQ ID NO: 1466)); the c-myc NLS having the amino acid sequence PAAKRVKLD (SEQ ID NO: 1474) or RQRRNELKRSP (SEQ ID NO: 1475); the hRNPA1 M9 NLS having the sequence NQSSNFGPMKGGNFGGRSSGPYGGGGQYFAKPRNQGGY (SEQ ID NO: 1476); the sequence RMRIZFKNKGKDTAELRRRRVEVSVELRKAKKDEQILKRRNV (SEQ ID NO: 1477) of the IBB domain from importin-alpha; the sequences VSRKRPRP (SEQ ID NO: 1478) and PPKKARED (SEQ ID NO: 1479) of the myoma T protein; the sequence PQPKKKPL (SEQ ID NO: 1480) of human p53; the sequence SALIKKKKKMAP (SEQ ID NO: 1481) of mouse c-abl IV; the sequences DRLRR (SEQ ID NO: 1482) and PKQKKRK (SEQ ID NO: 1483) of the influenza virus NS1; the sequence RKLKKKIKKL (SEQ ID NO: 1484) of the Hepatitis virus delta antigen; the sequence REKKKFLKRR (SEQ ID NO: 1485) of the mouse Mx1 protein; the sequence KRKGDEVDGVDEVAKKKSKK (SEQ ID NO: 1486) of the human poly(ADP-ribose) polymerase; and the sequence RKCLQAGMNLEARKTKK (SEQ ID NO: 1487) of the steroid hormone receptors (human) glucocorticoid. In general, the one or more NLSs are of sufficient strength to drive accumulation of the fusion protein in a detectable amount in the nucleus of a eukaryotic cell. In general, strength of nuclear localization activity may derive from the number of NLSs in the fusion protein, the particular NLS(s) used, or a combination of these factors. Detection of accumulation in the nucleus may be performed by any suitable technique. For example, a detectable marker may be fused to the fusion protein, such that location within a cell may be visualized, such as in combination with a means for detecting the location of the nucleus (e.g. a stain specific for the nucleus such as DAPI). Cell nuclei may also be isolated from cells, the contents of which may then be analyzed by any suitable process for detecting protein, such as immunohistochemistry, Western blot, or enzyme activity assay. Accumulation in the nucleus may also be determined indirectly, such as by an assay for the effect of the fusion protein (e.g. an assay for altered gene expression activity in a cell transformed with the DNA-targeting system comprising the fusion protein), as compared to a control condition (e.g. an untransformed cell). In some embodiments, the NLS comprises the sequence set forth in SEQ ID NO: 1466 (KRPAATKKAGQAKKKK), or a portion thereof. In some embodiments, a fusion protein provided herein comprises dCas9 and KRAB. In some embodiments, a fusion protein provided herein comprises NLS2-dSpCas9-NLS-KRAB-NLS2. In some embodiments, a fusion protein provided herein comprises the sequence set forth in SEQ ID NO: 1458, or an amino acid sequence that has at least 90%, 91%, 92%, 93%, 94%, 95%, 96%, 97%, 98%, or 99% sequence identity thereto.

### II. POLYNUCLEOTIDES AND VECTORS AND RELATED METHODS FOR DELIVERY

[0265] In some aspects, provided are polynucleotides encoding any of the DNA-targeting systems described herein or a portion or a component of any of the foregoing. In some aspects, the polynucleotides can encode any of the components of the DNA-targeting systems, and/or any nucleic acid or proteinaceous molecule necessary to carry out aspects of the methods of the disclosure. In particular embodiments, provided are polynucleotides encoding any of the fusion proteins described herein, and/or any of the gRNAs described herein.

[0266] In some embodiments, provided are polynucleotides comprising the gRNAs described herein. In some embodiments, the gRNA is transcribed from a genetic construct (i.e. vector or plasmid) in the target cell. In some embodiments, the gRNA is produced by in vitro transcription and delivered to the target cell. In some embodiments, the gRNA comprises one or more modified nucleotides for increased stability. In some embodiments, the gRNA is delivered to the target cell pre-complexed as a RNP with the fusion protein.

[0267] In some embodiments, a provided polynucleotide encodes a fusion protein as described herein that includes (a) a DNA-targeting domain capable of being targeted to a target site of a target gene as described; and (b) at least one effector domain capable of reducing transcription of the gene. In some embodiments, the fusion protein includes a fusion protein of a Cas protein or variant thereof and at least one effector domain capable of reducing transcription of a gene. In particular example, the Cas is a dCas, such as dCas9. In some embodiments, the dCas9 is a dSpCas9, such as polynucleotide encoding a dSpCas9 set forth in SEQ ID NO: 1464. Examples of such domains and fusion proteins include any as described in Section I.

[0268] In some embodiments, the polynucleotide comprises the sequence set forth in SEQ ID NO: 1457, or a sequence having at least about 80%, 85%, 90%, 91%, 92%, 93%, 94%, 95%, 96%, 97%, 98%, 99%, or 100% sequence identity thereto. In some embodiments, the polynucleotide is set forth in SEQ ID NO: 1457. In some embodiments, the polynucleotide encodes an amino acid sequence comprising SEQ ID NO: 1458, or a sequence having at least about 80%, 85%, 90%, 91%, 92%, 93%, 94%, 95%, 96%, 97%, 98%, 99%, or 100% sequence identity thereto. In some embodiments, the polynucleotide encodes the amino acid sequence set forth in SEQ ID NO: 1458.

[0269] In some embodiments, the polynucleotide is RNA or DNA. In some embodiments, the polynucleotide, such as a polynucleotide encoding a provided fusion protein, is mRNA. The mRNA can be 5′ capped and/or 3′ polyadenylated. In another embodiment, a polynucleotide provided herein, such as a polynucleotide encoding a provided fusion protein, is DNA. The DNA can be present in a vector.

[0270] In some embodiments, the polynucleotide encoding a DNA-binding domain of a DNA-targeting system or of a module of a multiplex DNA-targeting system comprises a sequence encoding a DNMT3A/L-dCas9-KRAB fusion protein. In some embodiments, the polynucleotide encoding DNMT3A/L-dCas9-KRAB fusion protein comprises the sequence set forth in SEQ ID NO:1505, or a sequence having at least about 80%, 85%, 90%, 91%, 92%, 93%, 94%, 95%, 96%, 97%, 98%, 99%, or 100% sequence identity thereto. In some embodiments, the polynucleotide encoding DNMT3A/L-dCas9-KRAB fusion protein is set forth in SEQ ID NO: 1505. In some embodiments, the polynucleotide encodes a DNMT3A/L-dCas9-KRAB fusion protein that has an amino acid sequence comprising SEQ ID NO: 1506, or a sequence having at least about 80%, 85%, 90%, 91%, 92%, 93%, 94%, 95%, 96%, 97%, 98%, 99%, or 100% sequence identity thereto. In some embodiments, the polynucleotide encodes a DNMT3A/L-dCas9-KRAB fusion protein that has the amino acid sequence set forth in SEQ ID NO: 1506. In some embodiments, the polynucleotide is RNA or DNA. In some embodiments, the polynucleotide, such as a polynucleotide encoding a provided fusion protein, is mRNA. The mRNA can be 5′ capped and/or 3′ polyadenylated. In another embodiment, a polynucleotide provided herein, such as a polynucleotide encoding a provided fusion protein, is DNA. The DNA can be present in a vector.

[0271] In some embodiments, the polynucleotide comprises a sequence encoding a DNMT3A/L-dCas9-KRAB fusion protein. In some embodiments, the polynucleotide encoding a DNMT3A/L-dCas9-KRAB fusion protein comprises the sequence set forth in SEQ ID NO:1507, or a sequence having at least about 80%, 85%, 90%, 91%, 92%, 93%, 94%, 95%, 96%, 97%, 98%, 99%, or 100% sequence identity thereto. In some embodiments, the polynucleotide encoding a DNMT3A/L-dCas9-KRAB fusion protein is set forth in SEQ ID NO: 1507. In some embodiments, the polynucleotide encodes a DNMT3A/L-dCas9-KRAB fusion protein that has an amino acid sequence comprising SEQ ID NO: 1507, or a sequence having at least about 80%, 85%, 90%, 91%, 92%, 93%, 94%, 95%, 96%, 97%, 98%, 99%, or 100% sequence identity thereto. In some embodiments, the polynucleotide encodes a DNMT3A/L-dCas9-KRAB fusion protein that has the amino acid sequence set forth in SEQ ID NO: 1508. In some embodiments, the polynucleotide is RNA or DNA. In some embodiments, the polynucleotide, such as a polynucleotide encoding a provided fusion protein, is mRNA. The mRNA can be 5′ capped and/or 3′ polyadenylated. In another embodiment, a polynucleotide provided herein, such as a polynucleotide encoding a provided fusion protein, is DNA. The DNA can be present in a vector.

[0272] In some embodiments, the polynucleotide comprises a sequence encoding a DNMT3A/L-dCas9-KRAB fusion protein. In some embodiments, the polynucleotide encoding a DNMT3A/L-dCas9-KRAB fusion protein comprises the sequence set forth in SEQ ID NO:1509, or a sequence having at least about 80%, 85%, 90%, 91%, 92%, 93%, 94%, 95%, 96%, 97%, 98%, 99%, or 100% sequence identity thereto. In some embodiments, the polynucleotide encoding a DNMT3A/L-dCas9-KRAB fusion protein is set forth in SEQ ID NO: 1509. In some embodiments, the polynucleotide encodes a DNMT3A/L-dCas9-KRAB-DNMT3A/L fusion protein that has an amino acid sequence comprising SEQ ID NO: 1509, or a sequence having at least about 80%, 85%, 90%, 91%, 92%, 93%, 94%, 95%, 96%, 97%, 98%, 99%, or 100% sequence identity thereto. In some embodiments, the polynucleotide encodes a DNMT3A/L-dCas9-KRAB fusion protein that has the amino acid sequence set forth in SEQ ID NO: 1509. In some embodiments, the polynucleotide is RNA or DNA. In some embodiments, the polynucleotide, such as a polynucleotide encoding a provided fusion protein, is mRNA. The mRNA can be 5′ capped and/or 3′ polyadenylated. In another embodiment, a polynucleotide provided herein, such as a polynucleotide encoding a provided fusion protein, is DNA. The DNA can be present in a vector.

[0273] Also provided herein is a vector that contains any of the provided polynucleotides. In some embodiments, the vector comprises a genetic construct, such as a plasmid or an expression vector.

[0274] In some embodiments, the expression vector comprising the sequence encoding the fusion protein of a DNA-targeting system provided herein can further comprise a polynucleotide sequence encoding at least one gRNA. The sequence encoding the gRNA can be operably linked to at least one transcriptional control sequence for expression of the gRNA in the cell. For example, DNA encoding the gRNA can be operably linked to a promoter sequence that is recognized by RNA polymerase III (Pol III). Examples of suitable Pol III promoters include, but are not limited to, mammalian U6, U3, H1, and 7SL RNA promoters.

[0275] In some embodiments, provided is a vector containing a polynucleotide that encodes a fusion protein comprising a DNA-targeting domain comprising a dCas and at least one effector domain capable of reducing transcription of a gene, and a polynucleotide(s) encoding at least one gRNA. In some embodiments, the dCas is a dCas9, such as dSpCas9. In some embodiments, the polynucleotide encodes a fusion protein that includes a dSpCas9 set forth in SEQ ID NO: 1464. In some embodiments, the polynucleotide encoding at least one gRNA encodes a gRNA as described in Section II.B.ii. For example, the polynucleotide can encode a gRNA comprising a spacer sequence selected from any one of SEQ ID NOS: 485-968, or a contiguous portion thereof of at least 14 nt. In some embodiments the polynucleotide encoding the at least one gRNA encodes a gRNA that comprises the sequence set forth in any one of SEQ ID NOS: 969-1452

[0276] In some embodiments, the effector domain is KRAB. In some embodiments, the effector domain is DNMT3A/L. In some embodiments, the vector includes a polynucleotide that encodes the amino acid sequence comprising SEQ ID NO: 1458, SEQ ID NO:1506, SEQ ID NO: 1508, SEQ ID NO: 1510 or a sequence having at least about 80%, 85%, 90%, 91%, 92%, 93%, 94%, 95%, 96%, 97%, 98%, 99%, or 100% sequence identity thereto, and a polynucleotide that encodes a gRNA such as any described in Section II.B.ii. In some embodiments, the polynucleotide encoding the at least one gRNA encodes a gRNA comprising a spacer sequence selected from any one of SEQ ID NOS: 485-968 or a contiguous portion thereof of at least 14 nt. In some embodiments, the gRNA further comprises the sequence set forth in SEQ ID NO: 1454. In some embodiments the polynucleotide encoding the at least one gRNA encodes a gRNA that comprises the sequence set forth in any one of SEQ ID NOS: 969-1452.

[0277] In some embodiments, the polynucleotide encodes the fusion protein and the at least one gRNA.

[0278] In some embodiments, the polynucleotide as provided herein can be codon optimized for efficient translation into protein in the eukaryotic cell or animal of interest. For example, codons can be optimized for expression in humans, mice, rats, hamsters, cows, pigs, cats, dogs, fish, amphibians, plants, yeast, insects, and so forth. Programs for codon optimization are available as freeware. Commercial codon optimization programs are also available.

[0279] In some embodiments, a polynucleotide described herein can comprise one or more transcription and/or translation control elements. Depending on the host/vector system utilized, any of a number of suitable transcription and translation control elements, including constitutive and inducible promoters, transcription enhancer elements, transcription terminators, etc. can be used in the expression vector.

[0280] Non-limiting examples of suitable eukaryotic promoters (i.e., promoters functional in a eukaryotic cell) include those from cytomegalovirus (CMV) immediate early, herpes simplex virus (HSV) thymidine kinase, early and late SV40, long terminal repeats (LTRs) from retrovirus, human elongation factor-1 promoter (EF1), a hybrid construct comprising the cytomegalovirus (CMV) enhancer fused to the chicken beta-actin promoter (CAG), murine stem cell virus promoter (MSCV), phosphoglycerate kinase-1 locus promoter (PGK), and mouse metallothionein-I.

[0281] For expressing small RNAs, including guide RNAs used in connection with the DNA-targeting systems, various promoters such as RNA polymerase III promoters, including for example U6 and H1, can be advantageous. Descriptions of and parameters for enhancing the use of such promoters are known in the art, and additional information and approaches are regularly being described; see, e.g., Ma, H. et al., Molecular Therapy-Nucleic Acids 3, e161 (2014) doi: 10.1038/mtna.2014.12.

[0282] The expression vector can also contain a ribosome binding site for translation initiation and a transcription terminator. The expression vector can also comprise appropriate sequences for amplifying expression. The expression vector can also include nucleotide sequences encoding non-native tags (e.g., histidine tag, hemagglutinin tag, green fluorescent protein, etc.) that are fused to the site-directed polypeptide, thus resulting in a fusion protein.

[0283] A promoter can be an inducible promoter (e.g., a heat shock promoter, tetracycline-regulated promoter, steroid-regulated promoter, metal-regulated promoter, estrogen receptor-regulated promoter, etc.). The promoter can be a constitutive promoter (e.g., CMV promoter, UBC promoter). In some cases, the promoter can be a spatially restricted and/or temporally restricted promoter (e.g., a tissue specific promoter, a cell type specific promoter (e.g. a T cell specific promoter), etc.).

[0284] Expression vectors contemplated include, but are not limited to, viral vectors based on vaccinia virus, poliovirus, adenovirus, adeno-associated virus, SV40, herpes simplex virus, human immunodeficiency virus, retrovirus (e.g., Murine Leukemia Virus, spleen necrosis virus, and vectors derived from retroviruses such as Rous Sarcoma Virus, Harvey Sarcoma Virus, avian leukosis virus, a lentivirus, human immunodeficiency virus, myeloproliferative sarcoma virus, and mammary tumor virus) and other recombinant vectors. Other vectors contemplated for eukaryotic target cells include, but are not limited to, the vectors pXT1, pSG5, pSVK3, pBPV, pMSG, and pSVLSV40 (Pharmacia). Other vectors can be used so long as they are compatible with the host cell.

[0285] In some embodiments, the vector is a viral vector, such as an adeno-associated virus (AAV) vector, a retroviral vector, a lentiviral vector, or a gammaretroviral vector. In some embodiments, the viral vector is an adeno-associated virus (AAV) vector. In some embodiments, the AAV vector is selected from among an AAV1, AAV2, AAV3, AAV4, AAV5, AAV6, AAV7, AAV8, or AAV9 vector. In some embodiments, the vector is a lentiviral vector. In some embodiments, the vector is a non-viral vector, for example a lipid nanoparticle, a liposome, an exosome, or a cell penetrating peptide. In some embodiments, the vector comprises one vector, or two or more vectors.

[0286] In some embodiments, the vector exhibits immune cell or T cell tropism.

[0287] In some aspects, provided herein are pluralities of vectors that comprise any of the vectors described herein, and one or more additional vectors comprising one or more additional polynucleotides encoding an additional portion or an additional component of any of the DNA-targeting systems described herein, any of the gRNAs described herein, any of the fusion proteins described herein, or a portion or a component of any of the foregoing.

[0288] Provided are pluralities of vectors, that include: a first vector comprising any of the polynucleotides described herein; and a second vector comprising any of the polynucleotides described herein.

[0289] In some aspects, vectors provided herein may be referred to as delivery vehicles. In some aspects, any of the DNA-targeting systems, components thereof, or polynucleotides disclosed herein can be packaged into or on the surface of delivery vehicles for delivery to cells. Delivery vehicles contemplated include, but are not limited to, nanospheres, liposomes, quantum dots, nanoparticles, polyethylene glycol particles, hydrogels, and micelles. As described in the art, a variety of targeting moieties can be used to enhance the preferential interaction of such vehicles with desired cell types or locations.

[0290] Methods of introducing a nucleic acid into a host cell are known in the art, and any known method can be used to introduce a nucleic acid (e.g., an expression construct) into a cell. Suitable methods include, include e.g., viral or bacteriophage infection, transfection, conjugation, protoplast fusion, lipofection, electroporation, calcium phosphate precipitation, polyethyleneimine (PEI)-mediated transfection, DEAE-dextran mediated transfection, liposome-mediated transfection, particle gun technology, calcium phosphate precipitation, direct micro injection, nanoparticle-mediated nucleic acid delivery, and the like. In some embodiments, the composition may be delivered by mRNA delivery and ribonucleoprotein (RNP) complex delivery. Direct delivery of the RNP complex, including the DNA-targeting domain complexed with the sgRNA, can eliminate the need for intracellular transcription and translation and can offer a robust platform for host cells with low transcriptional and translational activity. The RNP complexes can be introduced into the host cell by any of the methods known in the art.

[0291] Nucleic acids or RNPs of the disclosure can be incorporated into a host using virus-like particles (VLP). VLPs contain normal viral vector components, such as envelope and capsids, but lack the viral genome. For instance, nucleic acids expressing the Cas and sgRNA can be fused to the viral vector components such as gag and introduced into producer cells. The resulting virus-like particles containing the sgRNA-expressing vectors can infect the host cell for efficient editing.

[0292] Introduction of the complexes, polypeptides, and nucleic acids of the disclosure can occur by protein transduction domains (PTDs). PTDs, including the human immunodeficiency virus-1 TAT, herpes simplex virus-1 VP22, Drsophila Antennapedia Antp, and the poluarginines, are peptide sequences that can cross the cell membrane, enter a host cell, and deliver the complexes, polypeptides, and nucleic acids into the cell.

[0293] Introduction of the complexes, polypeptides, and nucleic acids of the disclosure into cells can occur by viral or bacteriophage infection, transfection, conjugation, protoplast fusion, lipofection, electroporation, nucleofection, calcium phosphate precipitation, polyethyleneimine (PEI)-mediated transfection, DEAE-dextran mediated transfection, liposome-mediated transfection, particle gun technology, calcium phosphate precipitation, direct micro-injection, nanoparticle-mediated nucleic acid delivery, and the like, for example as described in WO 2017/193107 A2, WO 2016/123578 A1, WO 2014/152432 A2, WO 2014/093661 A2, WO 2014/093655 A2, or WO 2021/226555 A2.

[0294] Various methods for the introduction of polynucleotides are well known and may be used with the provided methods and compositions. Exemplary methods include those for transfer of polynucleotides encoding the DNA targeting systems provided herein, including via viral, e.g., retroviral or lentiviral, transduction, transposons, and electroporation.

[0295] In some embodiments, polynucleotides can be cloned into a suitable vector, such as an expression vector or vectors. The expression vector can be any suitable recombinant expression vector, and can be used to transform or transfect any suitable cell. Suitable vectors include those designed for propagation and expansion or for expression or both, such as plasmids and viruses.

[0296] In some embodiments, the vector can a vector of the pUC series (Fermentas Life Sciences), the pBluescript series (Stratagene, LaJolla, Calif.), the pET series (Novagen, Madison, Wis.), the pGEX series (Pharmacia Biotech, Uppsala, Sweden), or the pEX series (Clontech, Palo Alto, Calif.). In some embodiments, animal expression vectors include pEUK-Cl, pMAM and pMAMneo (Clontech). In some embodiments, a viral vector is used, such as a lentiviral or retroviral vector. In some embodiments, the recombinant expression vectors can be prepared using standard recombinant DNA techniques. In some embodiments, vectors can contain regulatory sequences, such as transcription and translation initiation and termination codons, which are specific to the type of host into which the vector is to be introduced, as appropriate and taking into consideration whether the vector is DNA- or RNA-based. In some embodiments, the vector can contain a nonnative promoter operably linked to the nucleotide sequence encoding the recombinant receptor. In some embodiments, the promoter can be a non-viral promoter or a viral promoter, such as a cytomegalovirus (CMV) promoter, an SV40 promoter, an RSV promoter, and a promoter found in the long-terminal repeat of the murine stem cell virus. Other promoters known to a skilled artisan also are contemplated.

[0297] In some embodiments, recombinant nucleic acids are transferred into cells using recombinant infectious virus particles, such as, e.g., vectors derived from simian virus 40 (SV40), adenoviruses, or adeno-associated virus (AAV). In some embodiments, recombinant nucleic acids are transferred into cells (e.g. T cells) using recombinant lentiviral vectors or retroviral vectors, such as gamma-retroviral vectors (see, e.g., Koste et al. (2014) Gene Therapy 2014 Apr. 3. doi: 10.1038/gt.2014.25; Carlens et al. (2000) Exp Hematol 28 (10): 1137-46; Alonso-Camino et al. (2013) Mol Ther Nucl Acids 2, e93; Park et al., Trends Biotechnol. 2011 Nov. 29 (11): 550-557.

[0298] In some embodiments, the retroviral vector has a long terminal repeat sequence (LTR), e.g., a retroviral vector derived from the Moloney murine leukemia virus (MoMLV), myeloproliferative sarcoma virus (MPSV), murine embryonic stem cell virus (MESV), murine stem cell virus (MSCV), spleen focus forming virus (SFFV), or adeno-associated virus (AAV). Most retroviral vectors are derived from murine retroviruses. In some embodiments, the retroviruses include those derived from any avian or mammalian cell source. The retroviruses typically are amphotropic, meaning that they are capable of infecting host cells of several species, including humans. In one embodiment, the gene to be expressed replaces the retroviral gag, pol and/or env sequences. A number of illustrative retroviral systems have been described (e.g., U.S. Pat. Nos. 5,219,740; 6,207,453; 5,219,740; Miller and Rosman (1989) BioTechniques 7:980-990; Miller, A. D. (1990) Human Gene Therapy 1:5-14; Scarpa et al. (1991) Virology 180:849-852; Burns et al. (1993) Proc. Natl. Acad. Sci. USA 90:8033-8037; and Boris-Lawrie and Temin (1993) Cur. Opin. Genet. Develop. 3:102-109. Methods of lentiviral transduction are known. Exemplary methods are described in, e.g., Wang et al. (2012) J. Immunother. 35 (9): 689-701; Cooper et al. (2003) Blood. 101:1637-1644; Verhoeyen et al. (2009) Methods Mol Biol. 506:97-114; and Cavalieri et al. (2003) Blood. 102 (2): 497-505.

[0299] In some embodiments, the vector is a lentiviral vector. In some embodiments, the lentiviral vector is an integrase-deficient lentiviral vector. In some embodiments, the lentiviral vector is a recombinant lentiviral vector. In some embodiments, the lentivirus is selected or engineered for a desired tropism (e.g. for T cell or immune cell tropism). Methods of lentiviral production, transduction, and engineering are known, for example as described in Kasaraneni, N. et al. Sci. Rep. 8 (1): 10990 (2018), Ghaleh, H. E. G. et al. Biomed. Pharmacother. 128:110276 (2020), and Milone, M. C. et al. Leukemia. 32 (7): 1529-1541 (2018). Additional methods for lentiviral transduction are described, for example in Wang et al. (2012) J. Immunother. 35 (9): 689-701; Cooper et al. (2003) Blood. 101:1637-1644; Verhoeyen et al. (2009) Methods Mol Biol. 506:97-114; and Cavalieri et al. (2003) Blood. 102 (2): 497-505.

[0300] In some embodiments, recombinant nucleic acids are transferred into cells (e.g. T cells) via electroporation {see, e.g., Chicaybam et al, (2013) PLOS ONE 8 (3): e60298 and Van Tedeloo et al. (2000) Gene Therapy 7 (16): 1431-1437). In some embodiments, recombinant nucleic acids are transferred into cells via transposition (see, e.g., Manuri et al. (2010) Hum Gene Ther 21 (4): 427-437; Sharma et al. (2013) Molec Ther Nucl Acids 2, e74; and Huang et al. (2009) Methods Mol Biol 506:115-126). Other methods of introducing and expressing genetic material into immune cells include calcium phosphate transfection (e.g., as described in Current Protocols in Molecular Biology, John Wiley & Sons, New York. N.Y.), protoplast fusion, cationic liposome-mediated transfection; tungsten particle-facilitated microparticle bombardment (Johnston, Nature, 346:776-777 (1990)); and strontium phosphate DNA co-precipitation (Brash et al., Mol. Cell Biol., 7:2031-2034 (1987)).

### III. PHARMACEUTICAL COMPOSITIONS AND FORMULATIONS

[0301] In some aspects, provided herein are compositions, such as pharmaceutical compositions and formulations for administration, that include any of the DNA-targeting systems described herein, or any of the polynucleotides or vectors encoding the same. In some aspects, the pharmaceutical composition contains one or more DNA-targeting systems provided herein or a component thereof. In some aspects, the pharmaceutical composition comprises one or more vectors, e.g., viral vectors that contain polynucleotides that encode one or more components of the DNA-targeting systems provided herein. Such compositions can be used in accord with the provided methods, and/or with the provided articles of manufacture or compositions, such as in the prevention or treatment of diseases, conditions, and disorders, or in detection, diagnostic, and prognostic methods.

[0302] The term “pharmaceutical formulation” refers to a preparation which is in such form as to permit the biological activity of an active ingredient contained therein to be effective, and which contains no additional components which are unacceptably toxic to a subject or a cell to which the formulation would be administered.

[0303] In some embodiments, the pharmaceutical composition may further comprise a pharmaceutically acceptable excipient. The pharmaceutically acceptable excipient may be functional molecules as vehicles, adjuvants, carriers, or diluents.

[0304] A “pharmaceutically acceptable carrier” refers to an ingredient in a pharmaceutical formulation, other than an active ingredient, which is nontoxic to a subject. A pharmaceutically acceptable carrier includes, but is not limited to, a buffer, excipient, stabilizer, or preservative.

[0305] In some aspects, the choice of carrier is determined in part by the particular agent and/or by the method of administration. Accordingly, there are a variety of suitable formulations. For example, the pharmaceutical composition can contain preservatives. Suitable preservatives may include, for example, methylparaben, propylparaben, sodium benzoate, and benzalkonium chloride. In some aspects, a mixture of two or more preservatives is used. The preservative or mixtures thereof are typically present in an amount of about 0.0001% to about 2% by weight of the total composition. Carriers are described, e.g., by Remington's Pharmaceutical Sciences 16th edition, Osol, A. Ed. (1980). Pharmaceutically acceptable carriers are generally nontoxic to recipients at the dosages and concentrations employed, and include, but are not limited to: buffers such as phosphate, citrate, and other organic acids; antioxidants including ascorbic acid and methionine; preservatives (such as octadecyldimethylbenzyl ammonium chloride; hexamethonium chloride; benzalkonium chloride; benzethonium chloride; phenol, butyl or benzyl alcohol; alkyl parabens such as methyl or propyl paraben; catechol; resorcinol; cyclohexanol; 3-pentanol; and m-cresol); low molecular weight (less than about 10 residues) polypeptides; proteins, such as serum albumin, gelatin, or immunoglobulins; hydrophilic polymers such as polyvinylpyrrolidone; amino acids such as glycine, glutamine, asparagine, histidine, arginine, or lysine; monosaccharides, disaccharides, and other carbohydrates including glucose, mannose, or dextrins; chelating agents such as EDTA; sugars such as sucrose, mannitol, trehalose or sorbitol; salt-forming counter-ions such as sodium; metal complexes (e.g. Zn-protein complexes); and/or non-ionic surfactants such as polyethylene glycol (PEG).

[0306] In some embodiments, the pharmaceutically acceptable excipient may be a transfection facilitating agent, which may include surface active agents, such as immune-stimulating complexes (ISCOMS), Freunds incomplete adjuvant, LPS analog including monophosphoryl lipid A, muramyl peptides, quinone analogs, vesicles such as squalene and squalene, hyaluronic acid, lipids, liposomes, calcium ions, viral proteins, polyanions, polycations, or nanoparticles, or other known transfection facilitating agents.

[0307] In some embodiments, the transfection facilitating agent is a polyanion, polycation, including poly-L-glutamate (LGS), or lipid. In some embodiments, the transfection facilitating agent is poly-L-glutamate. In some embodiments, the transfection facilitating agent may also include surface active agents such as immune-stimulating complexes (ISCOMS), Freunds incomplete adjuvant, LPS analog including monophosphoryl lipid A, muramyl peptides, quinone analogs and vesicles such as squalene and squalene, and hyaluronic acid may also be used administered in conjunction with the genetic construct. In some embodiments, the DNA vector encoding the DNA-targeting system may also include a transfection facilitating agent such as lipids, liposomes, including lecithin liposomes or other liposomes known in the art, as a DNA-liposome mixture (see for example WO9324640), calcium ions, viral proteins, polyanions, polycations, or nanoparticles, or other known transfection facilitating agents. In some embodiments, the transfection facilitating agent is a polyanion, polycation, including poly-L-glutamate (LGS), or lipid.

[0308] Compositions in some embodiments are provided as sterile liquid preparations, e.g., isotonic aqueous solutions, suspensions, emulsions, dispersions, or viscous compositions, which may in some aspects be buffered to a selected pH. Liquid preparations are normally easier to prepare than gels, other viscous compositions, and solid compositions. Additionally, liquid compositions are somewhat more convenient to administer, especially by injection. Viscous compositions, on the other hand, can be formulated within the appropriate viscosity range to provide longer contact periods with specific tissues. Liquid or viscous compositions can comprise carriers, which can be a solvent or dispersing medium containing, for example, water, saline, phosphate buffered saline, polyol (for example, glycerol, propylene glycol, liquid polyethylene glycol) and suitable mixtures thereof.

[0309] Sterile injectable solutions can be prepared by incorporating the agent in a solvent, such as in admixture with a suitable carrier, diluent, or excipient such as sterile water, physiological saline, glucose, dextrose, or the like. The formulations to be used for in vivo or ex vivo administration or use are generally sterile. Sterility may be readily accomplished, e.g., by filtration through sterile filtration membranes.

[0310] The pharmaceutical composition in some embodiments contains components in amounts effective to treat or prevent the disease or condition, such as a therapeutically effective or prophylactically effective amount. Therapeutic or prophylactic efficacy in some embodiments is monitored by periodic assessment of treated subjects. For repeated administrations over several days or longer, depending on the condition, the treatment is repeated until a desired suppression of disease symptoms occurs. However, other dosage regimens may be useful and can be determined. The desired dosage can be delivered by a single bolus administration of the composition, by multiple bolus administrations of the composition, or by continuous infusion administration of the composition.

[0311] In some embodiments, the composition can be administered to a subject by any suitable means, for example, by bolus infusion or by injection, e.g., by intravenous or subcutaneous injection. In some embodiments, a given dose is administered by a single bolus administration of the composition. In some embodiments, the composition is administered by multiple bolus administrations of the composition, for example, over a period of no more than 3 days, or by continuous infusion administration of the composition. In some embodiments, the composition is administered parenterally, for example by intravenous, intramuscular, subcutaneous, or intraperitoneal administration. In some embodiments, the composition is administered to a subject using peripheral systemic delivery by intravenous, intraperitoneal, or subcutaneous injection.

[0312] In some embodiments, the composition is contacted with our introduced into cells (e.g. primary T cells) from a subject ex vivo, and the cells are subsequently administered to the same subject or to a different subject.

[0313] For the prevention or treatment of disease, the appropriate dosage may depend on the type of disease to be treated, the type of agent or agents, the type of cells or recombinant receptors, the severity and course of the disease, whether the agent or cells are administered for preventive or therapeutic purposes, previous therapy, the subject's clinical history and response to the agent or the cells, and the discretion of the attending physician. The compositions are in some embodiments suitably administered to the subject at one time or over a series of treatments.

### IV. METHODS OF EPIGENETICALLY MODIFYING LYMPHOID CELLS, SUCH AS T CELLS, AND MODIFIED CELLS AND COMPOSITIONS THEREOF

[0314] Provided herein are modified lymphoid cells (e.g. T cells) that have one or more modifications (also referred to as changes or alterations) in their epigenome. In some embodiments, the epigenetic change is a change relative to a comparable unmodified lymphoid cell. Reference to a comparable unmodified cell is understood to refer to the same or similar cell but that has not been introduced with a provided epigenome-modifying DNA-targeting system or that or that does not contain the same epigenetic changes (e.g. methylation or histone modification) of the target gene or regulatory region thereof.

[0315] In some embodiments, the lymphoid cells that are modified by the provided DNA-binding systems with an epigenetic change can include T cells, NK cells, or NKT cells. Such cells can include cells that have been enriched or isolated from a primary population of cells from a subject, or can include any cells that have been differentiated from stem cells into such lymphoid cells and/or have been differentiated from progenitor cells, such as common lymphoid progenitors (CLPs). In some embodiments, the lymphoid cells are differentiated from stem cells, such as hematopoietic stem or progenitor cells, or progenitor cells. In some embodiments, the lymphoid cells are trans-differentiated from a non-pluripotent cell of non-hematopoietic lineage. In particular embodiments, the cells are modified T cells that have been modified by the provided DNA-binding systems with an epigenetic change of one or more target genes.

[0316] Provided herein are modified T cells (e.g. CD4+ T cell or CD8+ T cell) that have one or more modifications (also referred to as changes or alterations) in their epigenome. In some embodiments, the modification increases or promotes a Tscm phenotype in the T cell. In some embodiments, the modified cell is a modified T cell that has a Tscm phenotype or a Tscm-like phenotype. In some embodiments, the epigenetic change is a change relative to a comparable unmodified T cell. Reference to a comparable unmodified T cells is understood to refer to the same or similar T cell but that has not been introduced with a provided epigenome-modifying DNA-targeting system or that or that does not contain the same epigenetic changes (e.g. methylation or histone modification) of the target gene or regulatory region thereof.

[0317] In some embodiments, the epigenetic change comprises a change in at least one of: DNA accessibility, histone methylation, acetylation, phosphorylation, ubiquitylation, sumoylation, ribosylation, citrullination, and DNA methylation. In some embodiments, the epigenetic change is an altered DNA methylation of a target site in a target gene or a regulatory element thereof as described herein. In some embodiments, the epigenetic change is a histone modification of a target site in a target gene or a regulatory element thereof as described herein.

[0318] Provided herein are methods of epigenetically modifying a lymphoid cell or a population of lymphoid cells. The methods provided herein include use of one or more epigenome-modifying DNA-targeting system provided herein, or polynucleotide or vector for delivery of same to the lymphoid cell or compositions of any of the foregoing. In some embodiments, the epigenome-modifying DNA-targeting system (or polynucleotides or vectors for delivery of same to the lymphoid cell or compositions of any of the foregoing) is contacted with a lymphoid cell or a population of lymphoid cells. In some embodiments, the contacting introduces the epigenome-modifying DNA-targeting system (or polynucleotides or vectors for delivery of same to the lymphoid cell or compositions of any of the foregoing) into the lymphoid cell, such as where it is able to translocate or localize to the nucleus of the lymphoid cell. In some embodiments, the methods reduce the expression of one or more of the described target genes in lymphoid cells (e.g. T cells) in the population of cells. Also provided herein is a population of lymphoid cells containing a plurality of any of the provided modified lymphoid cells.

[0319] Provided herein are methods of epigenetically modifying a T cell or a population of T cells. In some embodiments, such methods promote a Tscm phenotype, such as by altering the differentiation fate of the T cell to a Tscm phenotype. In some embodiments, such methods increase or enrich a Tscm phenotype among a population of T cells. Also provided herein are methods of promoting a Tscm phenotype in a T cell or a population of T cells. The methods provided herein include use of one or more epigenome-modifying DNA-targeting system provided herein, or polynucleotide or vector for delivery of same to the T cell or compositions of any of the foregoing. In some embodiments, the epigenome-modifying DNA-targeting system (or polynucleotides or vectors for delivery of same to the T cell or compositions of any of the foregoing) is contacted with a T cell or a population of T cells. In some embodiments, the methods promote a Tscm phenotype by the T cell or one or more T cells in the population. In some embodiments, the methods increase the percentage of Tscm T cells in the population of T cells.

[0320] In some embodiments, the epigenome-modifying DNA-targeting system (or polynucleotides or vectors for delivery of same to the T cell or compositions of any of the foregoing) can be introduced into a T cell or a population of T cells. In some embodiments, the epigenome-modifying DNA-targeting system (or polynucleotides or vectors for delivery of same to the T cell or compositions of any of the foregoing) can be cultured with a T cell or a population of T cells under conditions in which the epigenome-modifying DNA-targeting system (or polynucleotides or vectors for delivery of same to the T cell or compositions of any of the foregoing) will be introduced into or delivered to the T cell or one or more T cells in the population.

[0321] In some embodiments, the methods can be carried out in vitro. In other embodiments, the methods can be carried out ex vivo on T cells or a population containing T cells isolated from a subject. In other embodiments the epigenome-modifying DNA-targeting system (or polynucleotides or vectors for delivery of same to the T cell or compositions of any of the foregoing) can be administered to a subject, and then T cells can be isolated from the subject, such as for subsequent engineering. In still other embodiments the epigenome-modifying DNA-targeting system (or polynucleotides or vectors for delivery of same to the T cell or compositions of any of the foregoing) can be administered to a subject, and the T cells modified in vivo in the subject.

[0322] In any of the provided methods, the T cells can be T cells for use as a T cell based immunotherapy, such as for ACT. In certain embodiments, the population of lymphocytes is derived from peripheral blood mononuclear cells (PBMCs) isolated from the circulation of a subject. In certain embodiments, the population of lymphocytes is derived from lymphocytes isolated from a tumor (tumor infiltrating lymphocytes) of an individual. In certain embodiments, the population of lymphocytes comprises T lymphocytes (T cells). These cell populations can be heterogeneous comprised of a variety of lymphocytes, or they can be further subject to isolation/purification using density centrifugation (e.g., Percoll), fluorescently activated cell sorting (FACS), leukapheresis, or antibody based selection methods (positive or negative). T cells can be generally marked by expression of CD3, and further subdivided into cytotoxic (CD8+) or helper (CD4+) populations. When isolated/purified the cell population can comprise CD3+ cells at least 80%, 90%, or 95% pure. In certain embodiments, the population comprises CD3+, CD4+ T cells at least 80%, 90%, or 95% pure. In certain embodiments, the population comprises CD3+, CD8+ T cells at least 80%, 90%, or 95% pure.

[0323] In some embodiments, an isolated or purified cell population containing T cells can be further stimulated and, in some cases, expanded using standard methods, such as, incubation with anti-CD3 or CD28 antibody and/or co-culture with cytokines such as IL-2, IL-7 and/or IL-15. For instance, a population of isolated cells containing T cells can be further expanded using standard methods such as incubation with anti-CD3 or CD28 antibody and/or co-culture with cytokines such as IL-2, IL-7 and/or IL-15.

[0324] After the cells have been expanded the cells can comprise greater than 60%, 70%, 80%, 90%, or 95% CD3+ cells, CD3+CD4+ cells, or CD3+CD8+ cells. In certain embodiments, an aliquot of the cells can be tested for efficacy after expansion.

[0325] There are numerous methods available for isolating or expanding T cells or T-cell populations taken from an individual. Certain non-limiting methods of expanding and/or isolating T-cell populations are disclosed in U.S. Pat. Nos. 5,827,642; 6,316,257; 6,399,054; 7,745,140; 8,383,099; US 2003/0134341; US 2004/0241162; all of which are incorporated by reference herein in their entireties.

[0326] In some embodiments, the cells, such as T cells, may be further engineered with a recombinant antigen receptor, such as a chimeric antigen receptor (CAR) or an engineered TCR. In some embodiments, the cells may be stimulated (e.g. with anti-CD3 or CD28 antibody and/or IL-2, IL-7 and/or IL-15 cytokines) prior to engineering the cells, such as T cells, with the recombinant receptor. In some embodiments, the cells may be further expanded after engineering the cells, such as T cells, with the recombinant receptor.

[0327] In some embodiments, the cells, such as T cells, are engineered with a CAR. In some embodiments, the CAR is a chimeric receptor that contains an extracellular antigen targeting domain (e.g., an antibody Fab or single chain variable fragment) fused to a transmembrane domain, and an intracellular signaling domain that induces activation of the cells, such as T cell, upon interaction of the CD3 zeta signaling domain and a costimulatory signaling domain. Non-limiting examples of a costimulatory signaling domain include a CD28 intracellular domain or a 4-1BB intracellular domain. In some embodiments, the extracellular targeting domain is specific for a tumor associated antigen (TAA). Non-limiting examples of TAAs include, for example, CD19, glioma-associated antigen, carcinoembryonic antigen (CEA), β-human chorionic gonadotropin, alphafetoprotein (AFP), lectin-reactive AFP, thyroglobulin, RAGE-1, MN-CA IX, human telomerase reverse transcriptase, RU1, RU2 (AS), intestinal carboxyl esterase, mut hsp70-2, M-CSF, prostase, prostate-specific antigen (PSA), PAP, NY-ESO-1, LAGE-1a, p53, prostein, PSMA, Her2/neu, survivin and telomerase, prostate-carcinoma tumor antigen-1 (PCTA-1), MAGE, ELF2M, neutrophil elastase, ephrinB2, CD22, insulin growth factor (IGF)-I, IGF-II, IGF-I receptor and mesothelin, MART-1, Lewis Y antigen (LeY), tyrosinase and GP 100, prostatic acid phosphatase (PAP) prostate-specific antigen (PSA), ROR1, MUC16, CD171 (LICAM), B-cell maturation antigen (BCMA), WT1, HER-2/Neu/ErbB-2, CD19, CD20, or CD37. Current FDA approved CAR T cell therapies include axicabtagene ciloleucel (Yescarta™) and tisagenlecleucel (Kymriah™). CAR constructs and methods of their use are described in, by way of non-limiting example US20130287748A1; US 2014/0234348A1; or US 2014/0050708, all of which are incorporated by reference herein in their entirety.

[0328] In some embodiments, the T cells are engineered with a TCR. In some embodiments, the TCR is specific for a TAA. In particular embodiments, the TCR is a recombinant TCR that is introduced into the T cell and is heterologous to the T cell. The TCR can be specific for a TAA, such as, glioma-associated antigen, carcinoembryonic antigen (CEA), β-human chorionic gonadotropin, alphafetoprotein (AFP), lectin-reactive AFP, thyroglobulin, RAGE-1, MN-CA IX, human telomerase reverse transcriptase, RU1, RU2 (AS), intestinal carboxyl esterase, mut hsp70-2, M-CSF, prostase, prostate-specific antigen (PSA), PAP, NY-ESO-1, LAGE-1a, p53, prostein, PSMA, Her2/neu, survivin and telomerase, prostate-carcinoma tumor antigen-1 (PCTA-1), MAGE, ELF2M, neutrophil elastase, ephrinB2, CD22, insulin growth factor (IGF)-I, IGF-II, IGF-I receptor and mesothelin, MART-1, Lewis Y antigen (LeY), tyrosinase and GP 100, prostatic acid phosphatase (PAP) prostate-specific antigen (PSA), ROR1, MUC16, CD171 (LICAM), B-cell maturation antigen (BCMA), WT1, HER-2/Neu/ErbB-2, CD19, CD20, or CD37.

[0329] In some embodiments, the recombinant antigen receptor, such as a CAR or TCR, can be engineered into the cells, such as T cell, by viral transduction of a nucleic acid encoding the recombinant antigen receptor into a primary T-cell population, using for example a retroviral, adenoviral, or AAV-vector; or transfection via a lipid-based reagent or electroporation. In some embodiments, the methods described herein involve engineering a population of lymphoid cells, such as a T-cell population, with the recombinant antigen receptor (e.g. CAR or TCR) before contacting the population with the epigenome-modifying DNA-targeting system (or polynucleotides or vectors for delivery of same to the T cell or compositions of any of the foregoing). In certain embodiments, the methods involve engineering a population of lymphoid cells, such as a T-cell population, with the recombinant antigen receptor (e.g. CAR or TCR) after contacting the cells with the epigenome-modifying DNA-targeting system (or polynucleotides or vectors for delivery of same to the T cell or compositions of any of the foregoing). In some embodiments, when the engineered lymphocytes, such as T cells (e.g. CAR-T cells or eTCR-T cells), are generated from a primary lymphocyte population the cells are often autologous to the patient being treated. In some embodiments, a process for engineering T cells with a recombinant receptor (e.g. CAR or TCR) includes isolating the T cells from a subject, stimulating the T cells in culture using a conventional method such as CD3/CD28 antibodies prior to transduction with a viral vector encoding the recombinant antigen receptor (e.g. CAR or TCR) and, if necessary, expanding the cells to generate sufficient cells for subsequent administration to the subject. In some embodiments, contacting the T cells with the epigenome-modifying DNA-targeting system (or polynucleotides or vectors for delivery of same to the T cell or compositions of any of the foregoing) can prior to or during any step of stimulating, transducing or expanding the T cells.

[0330] In certain embodiments, an isolated or purified cell population containing T cells is incubated with peptide antigen and, in some cases also irradiated feeder cells or other agents, to expand one or more T cells of a certain antigen specificity. In certain embodiments, the peptide antigen comprises a tumor associated antigen. In some embodiments, such an isolated or purified cell population includes tumor infiltrating lymphocytes (TILs) such as for TIL therapy. In some embodiments, the population can be stimulated or activated by a specific tumor-associated antigen either before or after contact with epigenome-modifying DNA-targeting system (or polynucleotides or vectors for delivery of same to the T cell or compositions of any of the foregoing). A tumor associated antigen (TAA) is one that is exclusively expressed or highly expressed by a neoplastic cell compared to a normal cell of the same origin. Known tumor-associated antigens include, for example, glioma-associated antigen, carcinoembryonic antigen (CEA), β-human chorionic gonadotropin, alphafetoprotein (AFP), lectin-reactive AFP, thyroglobulin, RAGE-1, MN-CA IX, human telomerase reverse transcriptase, RU1, RU2 (AS), intestinal carboxyl esterase, mut hsp70-2, M-CSF, prostase, prostate-specific antigen (PSA), PAP, NY-ESO-1, LAGE-1a, p53, prostein, PSMA, Her2/neu, survivin and telomerase, prostate-carcinoma tumor antigen-1 (PCTA-1), MAGE, ELF2M, neutrophil elastase, ephrinB2, CD22, insulin growth factor (IGF)-I, IGF-II, IGF-I receptor and mesothelin, MART-1, Lewis Y antigen (LeY), tyrosinase and GP 100, prostatic acid phosphatase (PAP) prostate-specific antigen (PSA), ROR1, MUC16, CD171 (LICAM), B-cell maturation antigen (BCMA), WT1, HER-2/Neu/ErbB-2, CD19, CD20, CD37, or patient specific idiotype. In certain embodiments, greater than 50%, 60%, 70%, 80%, 90%, or 95% of the T-cell population can be specific for a tumor associated antigen (as defined by tetramer staining for example). In certain embodiments, the T-cell population may not be stimulated with TAA, but may possess specificity for the TAA, as indicated for example, by tetramer staining.

[0331] In some embodiments, the population of cells, such as T cells, may be autologous to a subject to be treated. For instance, the population of lymphoid cells, such as T-cell populations, to be contacted with an epigenome-modifying DNA-targeting system (or polynucleotides or vectors for delivery of same to the T cell or compositions of any of the foregoing) can be derived from an individual that will ultimately be treated with the cell-based immunotherapeutic (e.g., an autologous population). In certain embodiments, when an autologous cell population is used the cell population has been contacted in vitro with the epigenome-modifying DNA-targeting system (or polynucleotides or vectors for delivery of same to the cells, such as T cell, or compositions of any of the foregoing). In certain embodiments, when an autologous cell population is used a subject to be treated has been administered the epigenome-modifying DNA-targeting system (or polynucleotides or vectors for delivery of same to the cell, such as T cell, or compositions of any of the foregoing) on one or more occasions prior to isolation of the cell population.

[0332] In other embodiments, the population of lymphoid cells, such as population of T cells, may be for allogeneic therapy. In such an example, the population of lymphoid cells, such as T-cell population, to be contacted with an epigenome-modifying DNA-targeting system (or polynucleotides or vectors for delivery of same to the cells, such as T cell, or compositions of any of the foregoing) can be derived from a different individual (e.g., a heterologous population) than is to be treated. In certain embodiments, when a heterologous cell population is used it is from an HLA matched individual (e.g., syngeneic) or an HLA mismatched individual (e.g., allogeneic). In certain embodiments, when a heterologous cell population is used it is from an HLA mismatched donor. In certain embodiments, when a heterologous cell population is used it is a T cell line that can be established from an autologous or heterologous source.

[0333] T cell populations can also be derived from hematopoietic stem cells (HSCs) or induced pluripotent stem cells (iPSCs) using methods known in the art. In certain embodiments, T-cell populations are derived/differentiated from iPSCs. The source of the iPSCs can be either autologous or heterologous. In certain embodiments, T-cell populations are derived/differentiated from (HSCs) cells. The source of the HSCs can be either autologous or heterologous.

[0334] In some embodiments, the modified T cell comprises an epigenetic or phenotypic modification resulting from being contacted by any of the DNA-targeting systems described herein, including any including any gRNA described herein.

[0335] In some embodiments, the modified T cell is derived from a cell from a subject, such as a primary T cell, a T cell progenitor, a pluripotent stem cell, or an induced pluripotent stem cell. In some embodiments, the modified T cell is derived from a primary T cell.

[0336] In some embodiments, the modified T cell is derived from a subject. In some embodiments, the subject has or is suspected of having cancer.

[0337] In some aspects, provided herein are methods for modulating (e.g. reducing transcription of) the expression of a gene in a cell (e.g. a T cell), the method comprising: introducing into the cell any of the DNA-targeting systems described herein, or a polynucleotide or vector containing or encoding the same. In some embodiments, the expression of the one or more genes is reduced in comparison to a comparable cell not subjected to the method. In some embodiments, the expression of the one or more genes is reduced by at least about 1.2-fold, 1.25-fold, 1.3-fold, 1.4-fold, 1.5-fold, 1.6-fold, 1.7-fold, 1.75-fold, 1.8-fold, 1.9-fold, 2-fold, 2.5-fold, 3-fold, 4-fold, 5-fold, 10-fold, 20-fold, 30-fold, 40-fold, 50-fold, 100-fold, 200-fold, 300-fold, 400-fold, 500-fold, 1000-fold or lesser. In some embodiments, the expression is stably reduced or transiently reduced. In some embodiments, the reduced expression of the one or more genes promotes a T_{SCM} cell-like phenotype in a T cell.

[0338] In some embodiments, the one or more modifications in the epigenome of the modified lymphoid cells, such as a T cell, NK cell or NK T cell, or any cells that have been differentiated from stem cells into such lymphoid cells and/or have been differentiated from progenitor cells, such as common lymphoid progenitors (CLPs), is by targeting one or more genes as described herein with a provided epigenome-modifying DNA-targeting system to change the epigenome of the cell. In some embodiments, the one or more modifications in the epigenome of the modified T cell is by targeting one or more genes as described herein with a provided epigenome-modifying DNA-targeting system to change the epigenome of the T cell. In some embodiments, the modified cell, such as modified T cell, includes an epigenetic change in a gene selected from the list consisting of: BMP4, E2F7, ESRRG, LYL1, STAT5A, THAP10, ZNF362, ZSCAN1, ANHX, CPEB1, CSRNP1, EN2, EPAS1, IRX3, LHX8, NR5A2, PRDM16, RAX2, SCML4, SMAD1, SOX6, SUV39H1, TFDP1, ZNF287, ZNF438, ZNF681, ZNF853, BMP4, CARF, ESRRG, ESRRG, FOXR2, HOXA7, IRF9, KAT5, KLF5, NEUROD1, PAX6, PIN1, PURG, RARA, SNAPC5, STAT5A, TBX22, WT1, ZNF138, ZNF143, ZNF205, ZNF235, ZNF526, ZNF548, ZNF559, ZNF611, ZNF655, ZNF672, ZNF699, ZNF706, ZNF714, ZNF772, ZNF782, ZSCAN1, ZSCAN26, ADNP, AHRR, AKNA, ALX3, ALX4, AR, ARHGAP35, ARID3C, ARID5B, ASCL5, ATF6B, ATOH7, BARHL1, BARHL2, BATF, BBX, BHLHE40, BNC2, BRD4, BRD9, BSX, CCDC17, CDX1, CDX2, CDX4, CEBPB, CENPB, CLOCK, CREB3, CREB3L4, CSRNP3, CTCF, CUX1, CUX2, DACH2, DLX1, DLX4, DLX5, DLX6, DMRTB1, DNMT3B, DOTIL, DPF1, DR1, E2F2, E2F3, EBF3, EGR2, EHF, ELF5, ELMSAN1, EMX1, ETS2, ETV4, ETV4, ETV6, EZH1, FERD3L, FERD3L, FIZ1, FOS, FOSB, FOXA1, FOXA2, FOXA3, FOXC2, FOXD3, FOXE1, FOXJ3, FOXN2, FOXN4, FOXO1, FOXP3, FOXS1, GATA2, GATA3, GATAD2A, GCM2, GFI1, GLI2, GLYR1, GPBP1L1, GRHL1, GTF2B, GTF2I, HDAC2, HES2, HES7, HESX1, HEY1, HIF3A, HIVEP3, HLF, HLX, HMG20A, HMGA2, HMGN3, HMX2, HNF1A, HNF4G, HOXA1, HOXA11, HOXB1, HOXB2, HOXB3, HOXC12, HOXC9, HOXC9, HOXD9, HSF4, HSF5, IKZF1, IKZF2, IKZF3, IKZF4, IRF7, IRX3, ISL2, JRK, JRKL, KAT7, KDM1A, KDM2B, KDM5D, KLF14, KLF9, KMT2B, L3MBTL4, LEF1, LHX6, LHX9, LIN28A, LIN28A, LMX1A, MAF, MAFF, MBD3, MBD4, MBNL2, MED1, MED14, MED23, MED24, MEF2C, MEF2D, MEIS3, MESP1, MGA, MITF, MLX, MNX1, MYF5, MYOG, MYPOP, MYRFL, MYT1L, NCOR1, NEUROG1, NFAT5, NFATC2, NFATC3, NFE2L1, NFE2L3, NFIA, NFYB, NKX1-2, NKX2-3, NKX2-4, NKX2-5, NOTCH3, NOTO, NR1H2, NR1H4, NR112, NR2C2, NR2F1, OSR2, OTX1, OVOL1, PA2G4, PATZ1, PAX9, PAX9, PBX4, PGR, PITX1, PITX3, POU2F2, POU3F1, POU3F2, POU3F3, POU5F1, PRDM1, PRDM7, PRR12, PRRX1, RBCK1, RHOXF1, RUNX2, SALL3, SIM1, SIX1, SIX6, SKI, SKIL, SKOR1, SMAD2, SMAD5, SMYD3, SNAPC2, SOX1, SOX14, SOX30, SOX5, SOX6, SP2, SP3, SP5, SP8, SP9, SPIB, STAT5B, T, TBPL1, TBX5, TBX6, TCF12, TCF23, TCF3, TFAP2A, TFAP2E, TFDP2, TFDP3, TGIF2, TGIF2LX, THAP6, THRA, TIGD1, TIGD3, TIGD5, TLX3, TOX, TOX2, TRIM27, TRIM27, TRIM40, TRIM52, TSHZ2, VAX1, VEGFA, VSX1, WNT1, WNT3A, YBX1, YY1, YY2, ZBED5, ZBTB2, ZBTB21, ZBTB38, ZBTB4, ZBTB40, ZBTB42, ZBTB49, ZBTB7B, ZBTB7C, ZBTB8B, ZBTB9, ZC3H8, ZEB2, ZFHX2, ZFHX3, ZFP28, ZFP41, ZFP69B, ZFP90, ZGLP1, ZHX3, ZIC5, ZKSCAN1, ZKSCAN2, ZKSCAN7, ZNF107, ZNF121, ZNF132, ZNF135, ZNF140, ZNF141, ZNF222, ZNF225, ZNF229, ZNF230, ZNF248, ZNF25, ZNF26, ZNF267, ZNF280C, ZNF281, ZNF283, ZNF286B, ZNF304, ZNF317, ZNF318, ZNF320, ZNF33B, ZNF346, ZNF358, ZNF367, ZNF382, ZNF383, ZNF385B, ZNF391, ZNF415, ZNF423, ZNF43, ZNF432, ZNF433, ZNF436, ZNF441, ZNF443, ZNF461, ZNF462, ZNF468, ZNF473, ZNF483, ZNF486, ZNF491, ZNF507, ZNF514, ZNF519, ZNF540, ZNF543, ZNF546, ZNF549, ZNF555, ZNF562, ZNF567, ZNF569, ZNF574, ZNF577, ZNF596, ZNF610, ZNF616, ZNF621, ZNF626, ZNF627, ZNF629, ZNF630, ZNF630, ZNF641, ZNF645, ZNF658, ZNF660, ZNF662, ZNF677, ZNF682, ZNF697, ZNF703, ZNF705A, ZNF705B, ZNF705G, ZNF716, ZNF729, ZNF750, ZNF75A, ZNF765, ZNF771, ZNF773, ZNF774, ZNF778, ZNF784, ZNF789, ZNF804B, ZNF816, ZNF823, ZNF83, ZNF831, ZNF846, ZNF852, ZNF879, ZNF91, ZNF93, ZNF99, ZNF99, ZSCAN16, ZSCAN2, ZSCAN21, ZSCAN5A, and ZSCAN5B. In some embodiments, the gene is selected from the list consisting of: BMP4, E2F7, ESRRG, LYL1, STAT5A, THAP10, ZNF362, ZSCAN1, ANHX, CPEB1, CSRNP1, EN2, EPAS1, IRX3, LHX8, NR5A2, PRDM16, RAX2, SCML4, SMAD1, SOX6, SUV39H1, TFDP1, ZNF287, ZNF438, ZNF681, and ZNF853. In some embodiments, the gene is selected from the list consisting of: BMP4, E2F7, ESRRG, LYL1, STAT5A, THAP10, ZNF362, and ZSCAN1.

[0339] In some embodiments, the modified cell, such as modified T cell has reduced expression of one or more genes selected from the list consisting of: BMP4, E2F7, ESRRG, LYL1, STAT5A, THAP10, ZNF362, ZSCAN1, ANHX, CPEB1, CSRNP1, EN2, EPAS1, IRX3, LHX8, NR5A2, PRDM16, RAX2, SCML4, SMAD1, SOX6, SUV39H1, TFDP1, ZNF287, ZNF438, ZNF681, ZNF853, BMP4, CARF, ESRRG, ESRRG, FOXR2, HOXA7, IRF9, KAT5, KLF5, NEUROD1, PAX6, PIN1, PURG, RARA, SNAPC5, STAT5A, TBX22, WT1, ZNF138, ZNF143, ZNF205, ZNF235, ZNF526, ZNF548, ZNF559, ZNF611, ZNF655, ZNF672, ZNF699, ZNF706, ZNF714, ZNF772, ZNF782, ZSCAN1, ZSCAN26, ADNP, AHRR, AKNA, ALX3, ALX4, AR, ARHGAP35, ARID3C, ARID5B, ASCL5, ATF6B, ATOH7, BARHL1, BARHL2, BATF, BBX, BHLHE40, BNC2, BRD4, BRD9, BSX, CCDC17, CDX1, CDX2, CDX4, CEBPB, CENPB, CLOCK, CREB3, CREB3L4, CSRNP3, CTCF, CUX1, CUX2, DACH2, DLX1, DLX4, DLX5, DLX6, DMRTB1, DNMT3B, DOTIL, DPF1, DR1, E2F2, E2F3, EBF3, EGR2, EHF, ELF5, ELMSAN1, EMX1, ETS2, ETV4, ETV4, ETV6, EZH1, FERD3L, FERD3L, FIZ1, FOS, FOSB, FOXA1, FOXA2, FOXA3, FOXC2, FOXD3, FOXE1, FOXJ3, FOXN2, FOXN4, FOXO1, FOXP3, FOXS1, GATA2, GATA3, GATAD2A, GCM2, GFI1, GLI2, GLYR1, GPBP1L1, GRHL1, GTF2B, GTF2I, HDAC2, HES2, HES7, HESX1, HEY1, HIF3A, HIVEP3, HLF, HLX, HMG20A, HMGA2, HMGN3, HMX2, HNF1A, HNF4G, HOXA1, HOXA11, HOXB1, HOXB2, HOXB3, HOXC12, HOXC9, HOXC9, HOXD9, HSF4, HSF5, IKZF1, IKZF2, IKZF3, IKZF4, IRF7, IRX3, ISL2, JRK, JRKL, KAT7, KDM1A, KDM2B, KDM5D, KLF14, KLF9, KMT2B, L3MBTL4, LEF1, LHX6, LHX9, LIN28A, LIN28A, LMX1A, MAF, MAFF, MBD3, MBD4, MBNL2, MED1, MED14, MED23, MED24, MEF2C, MEF2D, MEIS3, MESP1, MGA, MITF, MLX, MNX1, MYF5, MYOG, MYPOP, MYRFL, MYT1L, NCOR1, NEUROG1, NFAT5, NFATC2, NFATC3, NFE2L1, NFE2L3, NFIA, NFYB, NKX1-2, NKX2-3, NKX2-4, NKX2-5, NOTCH3, NOTO, NR1H2, NR1H4, NR112, NR2C2, NR2F1, OSR2, OTX1, OVOL1, PA2G4, PATZ1, PAX9, PAX9, PBX4, PGR, PITX1, PITX3, POU2F2, POU3F1, POU3F2, POU3F3, POU5F1, PRDM1, PRDM7, PRR12, PRRX1, RBCK1, RHOXF1, RUNX2, SALL3, SIM1, SIX1, SIX6, SKI, SKIL, SKOR1, SMAD2, SMAD5, SMYD3, SNAPC2, SOX1, SOX14, SOX30, SOX5, SOX6, SP2, SP3, SP5, SP8, SP9, SPIB, STAT5B, T, TBPL1, TBX5, TBX6, TCF12, TCF23, TCF3, TFAP2A, TFAP2E, TFDP2, TFDP3, TGIF2, TGIF2LX, THAP6, THRA, TIGD1, TIGD3, TIGD5, TLX3, TOX, TOX2, TRIM27, TRIM27, TRIM40, TRIM52, TSHZ2, VAX1, VEGFA, VSX1, WNT1, WNT3A, YBX1, YY1, YY2, ZBED5, ZBTB2, ZBTB21, ZBTB38, ZBTB4, ZBTB40, ZBTB42, ZBTB49, ZBTB7B, ZBTB7C, ZBTB8B, ZBTB9, ZC3H8, ZEB2, ZFHX2, ZFHX3, ZFP28, ZFP41, ZFP69B, ZFP90, ZGLP1, ZHX3, ZIC5, ZKSCAN1, ZKSCAN2, ZKSCAN7, ZNF107, ZNF121, ZNF132, ZNF135, ZNF140, ZNF141, ZNF222, ZNF225, ZNF229, ZNF230, ZNF248, ZNF25, ZNF26, ZNF267, ZNF280C, ZNF281, ZNF283, ZNF286B, ZNF304, ZNF317, ZNF318, ZNF320, ZNF33B, ZNF346, ZNF358, ZNF367, ZNF382, ZNF383, ZNF385B, ZNF391, ZNF415, ZNF423, ZNF43, ZNF432, ZNF433, ZNF436, ZNF441, ZNF443, ZNF461, ZNF462, ZNF468, ZNF473, ZNF483, ZNF486, ZNF491, ZNF507, ZNF514, ZNF519, ZNF540, ZNF543, ZNF546, ZNF549, ZNF555, ZNF562, ZNF567, ZNF569, ZNF574, ZNF577, ZNF596, ZNF610, ZNF616, ZNF621, ZNF626, ZNF627, ZNF629, ZNF630, ZNF630, ZNF641, ZNF645, ZNF658, ZNF660, ZNF662, ZNF677, ZNF682, ZNF697, ZNF703, ZNF705A, ZNF705B, ZNF705G, ZNF716, ZNF729, ZNF750, ZNF75A, ZNF765, ZNF771, ZNF773, ZNF774, ZNF778, ZNF784, ZNF789, ZNF804B, ZNF816, ZNF823, ZNF83, ZNF831, ZNF846, ZNF852, ZNF879, ZNF91, ZNF93, ZNF99, ZNF99, ZSCAN16, ZSCAN2, ZSCAN21, ZSCAN5A, and ZSCAN5B. In some embodiments, the gene is selected from the list consisting of: BMP4, E2F7, ESRRG, LYL1, STAT5A, THAP10, ZNF362, ZSCAN1, ANHX, CPEB1, CSRNP1, EN2, EPAS1, IRX3, LHX8, NR5A2, PRDM16, RAX2, SCML4, SMAD1, SOX6, SUV39H1, TFDP1, ZNF287, ZNF438, ZNF681, and ZNF853. In some embodiments, the gene is selected from the list consisting of: BMP4, E2F7, ESRRG, LYL1, STAT5A, THAP10, ZNF362, and ZSCAN1. In some embodiments, the expression of the gene in the modified T cell is reduced 1.5-fold or more compared to the expression of the same gene in a comparable unmodified T cell, such as reduced by at or about or greater than 2-fold, 3-fold, 4-fold, 5-fold, 6-fold, 7-fold, 8-fold, 9-fold, 10-fold or more.

[0340] In some embodiments, the modified T cell exhibits reduced expression of one or more genes whose transcriptional repression promotes a stem cell-like memory T (T_{SCM}) cell phenotype, in comparison to a comparable unmodified T cell, such as a T cell not subjected to the method, i.e. not contacted or introduced with the DNA-targeting system described herein. In some embodiments, the modified T cell has reduced expression of one more genes selected from the list consisting of: BMP4, E2F7, ESRRG, LYL1, STAT5A, THAP10, ZNF362, ZSCAN1, ANHX, CPEB1, CSRNP1, EN2, EPAS1, IRX3, LHX8, NR5A2, PRDM16, RAX2, SCML4, SMAD1, SOX6, SUV39H1, TFDP1, ZNF287, ZNF438, ZNF681, ZNF853, BMP4, CARF, ESRRG, ESRRG, FOXR2, HOXA7, IRF9, KAT5, KLF5, NEUROD1, PAX6, PIN1, PURG, RARA, SNAPC5, STAT5A, TBX22, WT1, ZNF138, ZNF143, ZNF205, ZNF235, ZNF526, ZNF548, ZNF559, ZNF611, ZNF655, ZNF672, ZNF699, ZNF706, ZNF714, ZNF772, ZNF782, ZSCAN1, ZSCAN26, ADNP, AHRR, AKNA, ALX3, ALX4, AR, ARHGAP35, ARID3C, ARID5B, ASCL5, ATF6B, ATOH7, BARHL1, BARHL2, BATF, BBX, BHLHE40, BNC2, BRD4, BRD9, BSX, CCDC17, CDX1, CDX2, CDX4, CEBPB, CENPB, CLOCK, CREB3, CREB3L4, CSRNP3, CTCF, CUX1, CUX2, DACH2, DLX1, DLX4, DLX5, DLX6, DMRTB1, DNMT3B, DOTIL, DPF1, DR1, E2F2, E2F3, EBF3, EGR2, EHF, ELF5, ELMSAN1, EMX1, ETS2, ETV4, ETV4, ETV6, EZH1, FERD3L, FERD3L, FIZ1, FOS, FOSB, FOXA1, FOXA2, FOXA3, FOXC2, FOXD3, FOXE1, FOXJ3, FOXN2, FOXN4, FOXO1, FOXP3, FOXS1, GATA2, GATA3, GATAD2A, GCM2, GFI1, GLI2, GLYR1, GPBP1L1, GRHL1, GTF2B, GTF2I, HDAC2, HES2, HES7, HESX1, HEY1, HIF3A, HIVEP3, HLF, HLX, HMG20A, HMGA2, HMGN3, HMX2, HNF1A, HNF4G, HOXA1, HOXA11, HOXB1, HOXB2, HOXB3, HOXC12, HOXC9, HOXC9, HOXD9, HSF4, HSF5, IKZF1, IKZF2, IKZF3, IKZF4, IRF7, IRX3, ISL2, JRK, JRKL, KAT7, KDM1A, KDM2B, KDM5D, KLF14, KLF9, KMT2B, L3MBTL4, LEF1, LHX6, LHX9, LIN28A, LIN28A, LMX1A, MAF, MAFF, MBD3, MBD4, MBNL2, MED1, MED14, MED23, MED24, MEF2C, MEF2D, MEIS3, MESP1, MGA, MITF, MLX, MNX1, MYF5, MYOG, MYPOP, MYRFL, MYT1L, NCOR1, NEUROG1, NFAT5, NFATC2, NFATC3, NFE2L1, NFE2L3, NFIA, NFYB, NKX1-2, NKX2-3, NKX2-4, NKX2-5, NOTCH3, NOTO, NR1H2, NR1H4, NR112, NR2C2, NR2F1, OSR2, OTX1, OVOL1, PA2G4, PATZ1, PAX9, PAX9, PBX4, PGR, PITX1, PITX3, POU2F2, POU3F1, POU3F2, POU3F3, POU5F1, PRDM1, PRDM7, PRR12, PRRX1, RBCK1, RHOXF1, RUNX2, SALL3, SIM1, SIX1, SIX6, SKI, SKIL, SKOR1, SMAD2, SMAD5, SMYD3, SNAPC2, SOX1, SOX14, SOX30, SOX5, SOX6, SP2, SP3, SP5, SP8, SP9, SPIB, STAT5B, T, TBPL1, TBX5, TBX6, TCF12, TCF23, TCF3, TFAP2A, TFAP2E, TFDP2, TFDP3, TGIF2, TGIF2LX, THAP6, THRA, TIGD1, TIGD3, TIGD5, TLX3, TOX, TOX2, TRIM27, TRIM27, TRIM40, TRIM52, TSHZ2, VAX1, VEGFA, VSX1, WNT1, WNT3A, YBX1, YY1, YY2, ZBED5, ZBTB2, ZBTB21, ZBTB38, ZBTB4, ZBTB40, ZBTB42, ZBTB49, ZBTB7B, ZBTB7C, ZBTB8B, ZBTB9, ZC3H8, ZEB2, ZFHX2, ZFHX3, ZFP28, ZFP41, ZFP69B, ZFP90, ZGLP1, ZHX3, ZIC5, ZKSCAN1, ZKSCAN2, ZKSCAN7, ZNF107, ZNF121, ZNF132, ZNF135, ZNF140, ZNF141, ZNF222, ZNF225, ZNF229, ZNF230, ZNF248, ZNF25, ZNF26, ZNF267, ZNF280C, ZNF281, ZNF283, ZNF286B, ZNF304, ZNF317, ZNF318, ZNF320, ZNF33B, ZNF346, ZNF358, ZNF367, ZNF382, ZNF383, ZNF385B, ZNF391, ZNF415, ZNF423, ZNF43, ZNF432, ZNF433, ZNF436, ZNF441, ZNF443, ZNF461, ZNF462, ZNF468, ZNF473, ZNF483, ZNF486, ZNF491, ZNF507, ZNF514, ZNF519, ZNF540, ZNF543, ZNF546, ZNF549, ZNF555, ZNF562, ZNF567, ZNF569, ZNF574, ZNF577, ZNF596, ZNF610, ZNF616, ZNF621, ZNF626, ZNF627, ZNF629, ZNF630, ZNF630, ZNF641, ZNF645, ZNF658, ZNF660, ZNF662, ZNF677, ZNF682, ZNF697, ZNF703, ZNF705A, ZNF705B, ZNF705G, ZNF716, ZNF729, ZNF750, ZNF75A, ZNF765, ZNF771, ZNF773, ZNF774, ZNF778, ZNF784, ZNF789, ZNF804B, ZNF816, ZNF823, ZNF83, ZNF831, ZNF846, ZNF852, ZNF879, ZNF91, ZNF93, ZNF99, ZNF99, ZSCAN16, ZSCAN2, ZSCAN21, ZSCAN5A, and ZSCAN5B. In some embodiments, the gene is selected from the list consisting of: BMP4, E2F7, ESRRG, LYL1, STAT5A, THAP10, ZNF362, ZSCAN1, ANHX, CPEB1, CSRNP1, EN2, EPAS1, IRX3, LHX8, NR5A2, PRDM16, RAX2, SCML4, SMAD1, SOX6, SUV39H1, TFDP1, ZNF287, ZNF438, ZNF681, and ZNF853. In some embodiments, the gene is selected from the list consisting of: BMP4, E2F7, ESRRG, LYL1, STAT5A, THAP10, ZNF362, and ZSCAN1. In some embodiments, the expression of the gene in the modified T cell is reduced 1.5-fold or more compared to the expression of the same gene in a comparable unmodified T cell, such as reduced by at or about or greater than 2-fold, 3-fold, 4-fold, 5-fold, 6-fold, 7-fold, 8-fold, 9-fold, 10-fold or more.

[0341] In some embodiments, the modified T cell exhibits a Tscm cell phenotype, or a Tscm cell-like phenotype. In some aspects, a Tscm phenotype comprises expression of one or more cell surface markers selected from CCR7+, CD27+, CD45RA+, CD45RO−, CCR7+, CD62L+, CD28+, CD27+, IL-7Rα+, CXCR3+, CD95+, CD11a+, IL-2Rβ+, CD58+, and CD57−. In some aspects, a Tscm phenotype comprises expression of CCR7 and/or CD27. In some aspects, a Tscm phenotype comprises expression of CCR7 and CD27.

[0342] Also provided herein is a population of cells containing a plurality of any of the provided modified T cells. In some embodiments, the population of T cells is enriched for cells that have a Tscm phenotype. In some embodiments, the population of T cells contains at least at or about 40%, at least at or about 50%, at least at or about 60%, at least at or about 70%, at least at or about 80% or at least at or about 90% of cells that have an epigenetic change (e.g. methylation or histone modification) at a target gene and exhibits a Tscm phenotype. In some aspects, a Tscm phenotype comprises expression of one or more cell surface markers selected from CCR7+, CD27+, CD45RA+, CD45RO−, CCR7+, CD62L+, CD28+, CD27+, IL-7Rα+, CXCR3+, CD95+, CD11a+, IL-2Rß+, CD58+, and CD57−. In some aspects, a Tscm phenotype comprises expression of CCR7 and/or CD27. In some aspects, a Tscm phenotype comprises expression of CCR7 and CD27.

[0343] In some embodiments, the population of cells, such as population of T cells, contains at least at or about 40%, at least at or about 50%, at least at or about 60%, at least at or about 70%, at least at or about 80% or at least at or about 90% of cells that have an epigenetic change (e.g. methylation or histone modification) at or near a target site in a target gene. In some embodiments, the population of cells, such as population of T cells, has an increased percentage of cells (e.g. T cells) that have an epigenetic change at or near a target site in a target gene compared to a comparable population of unmodified cell (e.g. T cell) not subjected to the method, i.e. not contacted or introduced with the DNA-targeting system described herein. In some embodiments, the epigenetic change is a change, such as on average in cells in the population, of at least one of: DNA accessibility, histone methylation, acetylation, phosphorylation, ubiquitylation, sumoylation, ribosylation, citrullination, and DNA methylation, compared to a comparable population of unmodified cell (e.g. T cell) not subjected to the method, i.e. not contacted or introduced with the DNA-targeting system described herein. In some embodiments the population of cells is a population of T cells. In some embodiments, the population of T cells contains at least at or about 40%, at least at or about 50%, at least at or about 60%, at least at or about 70%, at least at or about 80% or at least at or about 90% of cells that have an epigenetic change (e.g. methylation or histone modification) at or near a target site in a target gene and exhibits a Tscm phenotype. In some aspects, a Tscm phenotype comprises expression of one or more cell surface markers selected from CCR7+, CD27+, CD45RA+, CD45RO−, CCR7+, CD62L+, CD28+, CD27+, IL-7Rα+, CXCR3+, CD95+, CD11a+, IL-2Rß+, CD58+, and CD57−. In some aspects, a Tscm phenotype comprises expression of CCR7 and/or CD27. In some aspects, a Tscm phenotype comprises expression of CCR7 and CD27.

[0344] In some embodiments, provided herein is a population of cells that contains at least at or about 40%, at least at or about 50%, at least at or about 60%, at least at or about 70%, at least at or about 80% or at least at or about 90% of cells that have an epigenetic change (e.g. methylation or histone modification) at a target gene and that are double positive for CCR7 and CD27. In some embodiments, the population of cells is a population of T cells.

[0345] In some embodiments, the modified T cell or a composition containing a plurality of modified T cells is capable of a stronger and/or more persistent immune response (e.g. an anti-tumor immune response in vivo), in comparison to a comparable unmodified T cell or composition of unmodified T cells. In some embodiments, a subject having received administration of a composition of T cells containing provided modified T cells as a T cell therapy, e.g. CAR-T cell, is monitored for the presence, absence or level of T cells of the therapy in the subject, such as in a biological sample of the subject, e.g. in the blood of the subject. In some embodiments, the provided methods result in T cells of the adoptive T cell therapy with increased persistence and/or better potency in a subject to which it is administered. In some embodiments, the persistence of the adoptively transferred T cells, such as CAR-expressing T cells, in the subject is greater as compared to that which would be achieved by alternative methods, such as those involving administration of a T cell therapy but without having been treated or contacted with a provided DNA-targeting system. In some embodiments, the persistence is increased at least or about at least 1.5-fold, 2-fold, 3-fold, 4-fold, 5-fold, 6-fold, 7-fold, 8-fold, 9-fold, 10-fold, 20-fold, 30-fold, 50-fold, 60-fold, 70-fold, 80-fold, 90-fold, 100-fold or more.

[0346] In some embodiments, the degree or extent of persistence of administered cells can be detected or quantified after administration to a subject. For example, in some aspects, quantitative PCR (qPCR) is used to assess the quantity of cells expressing the recombinant receptor (e.g., CAR or recombinant TCR) or other surrogate marker expressed by T cells of the therapy in the blood or serum or organ or tissue (e.g., disease site) of the subject. In some aspects, persistence is quantified as copies of DNA or plasmid encoding the recombinant receptor (e.g., CAR or recombinant TCR) or surrogate marker per microgram of DNA or per microliter of the sample, e.g., of blood or serum, or per total number of peripheral blood mononuclear cells (PBMCs) or white blood cells or T cells per microliter of the sample. In some embodiments, flow cytometric assays using antibodies specific for the recombinant receptor or surrogate marker also can be performed to detect the adoptively transferred cells. Cell-based assays may also be used to detect the number or percentage of functional cells, such as cells capable of binding to and/or neutralizing and/or inducing responses, e.g., cytotoxic responses, against cells of the disease or condition or expressing the antigen recognized by the receptor. In any of such embodiments, the extent or level of expression of any marker (e.g. surrogate marker, CAR, recombinant TCR) known to be expressed by the adoptively transferred T cells but not endogenous T cells can be used to distinguish the administered cells from endogenous cells in a subject.

[0347] In some embodiments, the modified T cell or a composition containing a plurality of modified T cells, such a produced by any of the provided methods, exhibits a reduction in features associated with T cell exhaustion in comparison to a comparable unmodified T cell or composition of unmodified T cells. In some embodiments, the T cells, such as a composition containing a modified T cell or a composition of modified T cell provided herein, exhibits reduced exhaustion following long-term stimulation with antigen, either in vitro or in vivo. For example, an assay for assessing long-term stimulation with antigen may include a serial restimulation assay (see e.g. Jensen et al. Immunol. Rev. 2014; 257:127-144; Win et al. Journal of Immunotherapy, 2020; 43:107-120). In some embodiments, the percentage of T cells that exhibit an exhausted phenotype is reduced 2-fold, 3-fold, 4-fold, 5-fold, 6-fold, 7-fold, 8-fold, 9-fold, 10-fold or more.

[0348] Various assays are known and can be used to assess or determine if the T cells exhibit features of exhaustion or a reduction in features of exhaustion in comparison to a comparable unmodified T cell or composition of unmodified T cells. In some cases, exhaustion can be assessed by monitoring loss of T cell function, such as reduced or decreased antigen-specific or antigen receptor-driven activity, such as a reduced or decreased ability to produce cytokines or to drive cytolytic activity against target antigen. In some cases, exhaustion also can be assessed by monitoring expression of surface markers on T cells (e.g. CD4 and/or CD4 T cells) that are associated with an exhaustion phenotype. In some embodiments, the exhaustion marker is any one or more of PD-1, CTLA-4, TIM-3, LAG-3, BTLA, 2B4, CD160, CD39, VISTA, and TIGIT Among exhaustion markers are inhibitory receptors such as PD-1, CTLA-4, LAG-3 and TIM-3. In certain embodiments, the biological activity of the cells is measured by assaying expression and/or secretion of one or more cytokines, such as CD107a, IFNγ, IL-2, GM-CSF and TNFα, and/or by assessing cytolytic activity. In some embodiments, assays for the activity, phenotypes, proliferation and/or function of the T cells include, but are not limited to, ELISPOT, ELISA, cellular proliferation, cytotoxic lymphocyte (CTL) assay, binding to the T cell epitope, antigen or ligand, or intracellular cytokine staining, proliferation assays, lymphokine secretion assays, direct cytotoxicity assays, and limiting dilution assays. In some embodiments, proliferative responses of the T cells can be measured, e.g. by incorporation of ³H-thymidine, BrdU (5-Bromo-2′-Deoxyuridine) or 2′-deoxy-5-ethynyluridine (EdU) into their DNA or dye dilution assays, using dyes such as carboxyfluorescein diacetate succinimidyl ester (CFSE), CellTrace Violet, or membrane dye PKH26.

[0349] Also provided herein are compositions containing a modified lymphoid cell or a plurality of or population of modified lymphoid cells provided herein, such as modified T cells, NK cell, NKT cell, or such cells that are modified and have been differentiated from stem cells into such lymphoid cells and/or have been differentiated from progenitor cells, such as common lymphoid progenitors (CLPs). Also provided herein are compositions containing a modified T cell or a plurality of modified T cells provided herein. In some embodiments, the composition is a pharmaceutical composition and further contains a pharmaceutically acceptable carrier. Such compositions can be used in accord with the provided methods, and/or with the provided articles of manufacture or compositions, such as in the prevention or treatment of diseases, conditions, and disorders, or in detection, diagnostic, and prognostic methods.

[0350] Among the compositions are pharmaceutical compositions and formulations for administration, such as for adoptive cell therapy. In some embodiments, the engineered cells are formulated with a pharmaceutically acceptable carrier.

[0351] A pharmaceutically acceptable carrier can include all solvents, dispersion media, coatings, antibacterial and antifungal agents, isotonic and absorption delaying agents, and the like, compatible with pharmaceutical administration (Gennaro, 2000, Remington: The science and practice of pharmacy, Lippincott, Williams & Wilkins, Philadelphia, PA). Examples of such carriers or diluents include, but are not limited to, water, saline, Ringer's solutions, dextrose solution, and 5% human serum albumin. Liposomes and non-aqueous vehicles such as fixed oils may also be used. Supplementary active compounds can also be incorporated into the compositions. The pharmaceutical carrier should be one that is suitable for T cells, such as a saline solution, a dextrose solution or a solution comprising human serum albumin.

[0352] In some embodiments, the pharmaceutically acceptable carrier or vehicle for such compositions is any non-toxic aqueous solution in which the cells, such as T cells can be maintained, or remain viable, for a time sufficient to allow administration of live cells, such as live T cells. For example, the pharmaceutically acceptable carrier or vehicle can be a saline solution or buffered saline solution. The pharmaceutically acceptable carrier or vehicle can also include various bio materials that may increase the efficiency of the cells, such as T cells. Cell vehicles and carriers can, for example, include polysaccharides such as methylcellulose (M. C. Tate, D. A. Shear, S. W. Hoffman, D. G. Stein, M. C. LaPlaca, Biomaterials 22, 1113, 2001, which is incorporated herein by reference in its entirety), chitosan (Suh J K F, Matthew H W T. Biomaterials, 21, 2589, 2000; Lahiji A, Sohrabi A, Hungerford D S, et al., J Biomed Mater Res, 51, 586, 2000, each of which is incorporated herein by reference in its entirety), N-isopropylacrylamide copolymer P (NIPAM-co-AA) (Y. H. Bae, B. Vernon, C. K. Han, S. W. Kim, J. Control. Release 53, 249, 1998; H. Gappa, M. Baudys, J. J. Koh, S. W. Kim, Y. H. Bae, Tissue Eng. 7, 35, 2001, each of which is incorporated herein by reference in its entirety), as well as Poly (oxyethylene)/poly(D,L-lactic acid-co-glycolic acid) (B. Jeong, K. M. Lee, A. Gutowska, Y. H. An, Biomacromolecules 3, 865, 2002, which is incorporated herein by reference in its entirety), P (PF-co-EG) (Suggs L J, Mikos A G. Cell Trans, 8, 345, 1999, which is incorporated herein by reference in its entirety), PEO/PEG (Mann B K, Gobin A S, Tsai A T, Schmedlen R H, West J L., Biomaterials, 22, 3045, 2001; Bryant S J, Anseth K S. Biomaterials, 22, 619, 2001, each of which is incorporated herein by reference in its entirety), PVA (Chih-Ta Lee, Po-Han Kung and Yu-Der Lee, Carbohydrate Polymers, 61, 348, 2005, which is incorporated herein by reference in its entirety), collagen (Lee C R, Grodzinsky A J, Spector M., Biomaterials 22, 3145, 2001, which is incorporated herein by reference in its entirety), alginate (Bouhadir K H, Lee K Y, Alsberg E, Damm K L, Anderson K W, Mooney D J. Biotech Prog 17, 945, 2001; Smidsrd O, Skjak-Braek G., Trends Biotech, 8, 71, 1990, each of which is incorporated herein by reference in its entirety).

[0353] In some embodiments, the cells, such as T cells, can be present in the composition in an effective amount. In some embodiments, the composition contains an effective amount of T cells, such as containing modified T cells produced by the provided methods. In some embodiments, the composition of T cells are enriched in T cells with a Tscm phenotype. An effective amount of cells can vary depending on the patient, as well as the type, severity and extent of disease. Thus, a physician can determine what an effective amount is after considering the health of the subject, the extent and severity of disease, and other variables.

[0354] In some embodiments, the composition, including pharmaceutical composition, is sterile. In some embodiments, isolation, enrichment, or culturing of the cells is carried out in a closed or sterile environment, for example and for instance in a sterile culture bag, to minimize error, user handling and/or contamination. In some embodiments, sterility may be readily accomplished, e.g., by filtration through sterile filtration membranes. In some embodiments, culturing is carried out using a gas permeable culture vessel. In some embodiments, culturing is carried out using a bioreactor.

[0355] Also provided herein are compositions that are suitable for cryopreserving the provided lymphoid cells, such as modified cells including such lymphoid cells produced by any of the provided methods. In some embodiments, the lymphoid cells are cryopreserved in a serum-free cryopreservation medium.

[0356] Also provided herein are compositions that are suitable for cryopreserving the provided T cells, such as modified T cells including T cells produced by any of the provided methods. In some embodiments, the T cells are cryopreserved in a serum-free cryopreservation medium.

[0357] In some embodiments, the composition comprises a cryoprotectant. In some embodiments, the cryoprotectant is or comprises DMSO and/or s glycerol. In some embodiments, the cryopreservation medium is between at or about 5% and at or about 10% DMSO (v/v). In some embodiments, the cryopreservation medium is at or about 5% DMSO (v/v). In some embodiments, the cryopreservation medium is at or about 6% DMSO (v/v). In some embodiments, the cryopreservation medium is at or about 7% DMSO (v/v). In some embodiments, the cryopreservation medium is at or about 8% DMSO (v/v). In some embodiments, the cryopreservation medium is at or about 9% DMSO (v/v). In some embodiments, the cryopreservation medium is at or about 10% DMSO (v/v). In some embodiments, the cryopreservation medium contains a commercially available cryopreservation solution (CryoStor™ CS10). CryoStor™ CS10 is a cryopreservation medium containing 10% dimethyl sulfoxide (DMSO). In some embodiments, compositions formulated for cryopreservation can be stored at low temperatures, such as ultra low temperatures, for example, storage with temperature ranges from −40° C. to −150° C., such as or about 80° C.±6.0° C.

[0358] In some embodiments, the cryopreserved cells, such as T cells are prepared for administration by thawing. In some cases, the cells, such as T cells can be administered to a subject immediately after thawing. In such an embodiment, the composition is ready-to-use without any further processing. In other cases, the cells, such as T cells are further processed after thawing, such as by resuspension with a pharmaceutically acceptable carrier, incubation with an activating or stimulating agent, or are activated washed and resuspended in a pharmaceutically acceptable buffer prior to administration to a subject.

### V. METHODS OF TREATMENT

[0359] Provided herein are methods of treatment, e.g., including administering any of the compositions, such as pharmaceutical compositions described herein. In some aspects, also provided are methods of administering any of the compositions described herein to a subject, such as a subject that has a disease or disorder. The compositions, such as pharmaceutical compositions, described herein are useful in a variety of therapeutic, diagnostic and prophylactic indications. For example, the compositions are useful in treating a variety of diseases and disorders in a subject. Such methods and uses include therapeutic methods and uses, for example, involving administration of the compositions, to a subject having a disease, condition, or disorder, such as a tumor or cancer. In some embodiments, the compositions are administered in an effective amount to effect treatment of the disease or disorder. Uses include uses of the compositions in such methods and treatments, and in the preparation of a medicament in order to carry out such therapeutic methods. In some embodiments, the methods are carried out by administering the compositions to the subject having or suspected of having the disease or condition. In some embodiments, the methods thereby treat the disease or condition or disorder in the subject. Also provided are therapeutic methods for administering the cells and compositions to subjects, e.g., patients.

[0360] In some embodiments, the compositions include a DNA-targeting system provided herein, or a polynucleotide or vector encoding the same, in which delivery of the composition to a subject modulates one or more activities or function of lymphoid cells in a subject to thereby treat a disease or condition. For instance, in some embodiments, the subject has been previously treated with an adoptive cell therapy involving administration of a population of lymphoid cells (e.g. T cell, NK or NKT cell therapy, including primary cells or cells differentiated from stem cells or progenitor cells such as common lymphoid cells) for treating a disease or disorder, and administration of a provided DNA-targeting system, or a polynucleotide or vector encoding the same, modulates a phenotype or function of the adoptively transferred cells in the subject for treating the disease or condition. In some embodiments, the cells may include a T cell infiltrating lymphocyte (TIL) therapy. In some embodiments, the cells are engineered with an antigen receptor, such as a chimeric antigen receptor or T cell receptor, targeting an antigen associated with the disease or condition. In some embodiments, administration or use of a composition that includes a DNA-targeting system provided herein, or a polynucleotide or vector encoding the same, reduces expression of one or more target genes as described herein in the lymphoid cell.

[0361] In some embodiments, the compositions include a DNA-targeting system provided herein, or a polynucleotide or vector encoding the same, in which delivery of the composition to a subject modulates one or more activities or function of T cells in a subject to thereby treat a disease or condition. For instance, in some embodiments, the subject has been previously treated with an adoptive T cell therapy for treating a disease or disorder, such as a TIL therapy or a CAR- or TCR-engineered T cell therapy, and administration of a provided DNA-targeting system, or a polynucleotide or vector encoding the same, modulates a phenotype or function of the adoptively transferred T cells in the subject for treating the disease or condition. In some embodiments, administration or use of a composition that includes a DNA-targeting system provided herein, or a polynucleotide or vector encoding the same, reduces expression of one or more genes whose transcriptional repression promotes a T_{SCM} cell-like phenotype in a T cell. In some embodiments, the percentage of T cells of the adoptive cell therapy in the subject that has a T_{SCM} cell-like phenotype, e.g. CCR7+ and/or CD27+, is increased in the subject compared to prior to the administration of the composition that includes the DNA-targeting system or a polynucleotide or vector encoding the same.

[0362] In some aspects, also provided herein are methods of promoting a T_{SCM} cell phenotype in a T cell or in T cells in a subject, according to any description of a T_{SCM} cell phenotype provided herein. For instance, the Tscm phenotype includes T cells that are CCR7+ and/or CD27+, such as CCR7+ and CD27+. In some embodiments, the percentage of T cells that have a T_{SCM} cell-like phenotype, e.g. CCR7+ and/or CD27+, is increased in the subject compared to prior to the administration of the composition containing the DNA-targeting system or a polynucleotide or vector encoding the same. In some embodiments, the T cells include T cells of a previously administered adoptive cell therapy, such as CAR-expressing or recombinant TCR-expressing T cells.

[0363] In some embodiments, the methods of administering a composition containing the DNA-targeting system or a polynucleotide or vector encoding the same to a subject as provided herein are carried out in vivo (i.e. in a subject).

[0364] In some embodiments, methods of contacting a cell (e.g. T cell) with a composition containing the DNA-targeting system or a polynucleotide or vector encoding the same provided herein are carried out ex vivo on a cell from a subject, for example a primary T cell, a T cell progenitor, a pluripotent stem cell, or an induced pluripotent stem cell, such as by methods described in Section IV. In some embodiments, the methods provided herein are carried out ex vivo on a primary T cell. In some embodiments, when the methods are carried out ex vivo, such as by methods described in Section IV, the provided methods of treatment include administering a dose of the modified cells (e.g. T cells) to the subject for treating a disease or disorder. In some embodiments, the modified cells are modified T cells that have been epigenetically modified by the provided methods and enriched in T cells that have a Tscm phenotype.

[0365] In some embodiments, also provided herein are methods include administering to a subject a composition containing an epigenetically modified cells (e.g. epigenetically modified T cells) provided herein. In some embodiments, administration of an effective dose of epigenetically modified cells treats a disease or condition in the subject. In some embodiments, the dose of epigenetically modified cells (e.g. T cells) is for use in adoptive cell therapy. In some embodiments, the epigenetically modified cell is a tumor infiltrating lymphocyte (TIL) therapy. In some embodiments, the epigenetically modified cell is a T cell that has been engineered with a recombinant antigen receptor, such as a chimeric antigen receptor or a T cell receptor (TCR) in which targeting of the antigen by the recombinant receptor (e.g. CAR or TCR)-engineered T cell treats the disease or condition.

[0366] In some aspects, provided is a method for treating a disease in a subject, comprising administering to the subject a cellular composition that comprises any of the modified T cells described herein. In some aspects, the modified cell (e.g. T cell) is one that has been obtained from or derived from a cell from a subject and modified by contacting the cells with a provided DNA-targeting system or a polynucleotide or vector encoding the same. In some aspects, the modified T cell is obtained from or derived from a cell from a subject, and administered to the same subject (i.e. autologous adoptive cell therapy). In some aspects, the modified cell (e.g. T cell) is obtained from or derived from a cell from a subject, and administered to a different subject (i.e. allogeneic adoptive cell therapy).

[0367] In some embodiments, the methods of treatment or uses involve administration to a subject of an effective amount of a composition containing modified cells (e.g. T cells) provided herein. In some embodiments, the effective amount may include a dose of cells (e.g. T cells) of the composition from at or about 10⁵ to at about 10¹², or from at or about 10⁵ and at or about 10⁸, or from at or about 10⁶ and at or about 10¹², or from at or about 10⁸ and at or about 10¹¹, or from at or about 10⁹ and at or about 10¹⁰ of such. In some embodiments, the provided compositions containing modified cells (e.g. T cells) provided herein can be administered to a subject by any convenient route including parenteral routes such as subcutaneous, intramuscular, intravenous, and/or epidural routes of administration. In particular embodiments, the modified T cells are administered by intravenous infusion to the subject.

[0368] In some embodiments, the methods of treatment or uses involve administration to a subject of an effective amount of a composition containing modified cells T cells provided herein, including any such composition that is enriched in T cells of a Tscm phenotype as produced by the provided methods. In some embodiments, the effective amount may include a dose of T cells of the composition from at or about 10⁵ to at about 10¹², or from at or about 10⁵ and at or about 10⁸, or from at or about 10⁶ and at or about 10¹², or from at or about 10⁸ and at or about 10¹¹, or from at or about 10⁹ and at or about 10¹⁰ of such. In some embodiments, the provided compositions containing modified T cells provided herein can be administered to a subject by any convenient route including parenteral routes such as subcutaneous, intramuscular, intravenous, and/or epidural routes of administration. In particular embodiments, the modified T cells are administered by intravenous infusion to the subject.

[0369] In some embodiments, the provided methods can be used to treat any disease or disorder in which treatment is contemplated by the adoptive cell therapy. For instance, in the case of a CAR or a TCR, the disease or condition to be treated is any disease or condition that is associated with expression of an antigen that is recognized or targeted by the CAR- or TCR-cell therapy. In other embodiments, for the case of a TIL therapy the disease or condition is a tumor, and typically is a tumor present in the subject from which the TIL therapy was derived. Methods for adoptive T cell therapy are known, see e.g. for CAR-T cell therapy: U.S. Pat. Nos. 7,446,190, 7,741,465, WO2016109410, WO2012079000, WO2017015427, WO2017040930, WO2017149515, WO201716568; WO2017181119; for TCR-T cell therapy: US20160137715, US20190321478; WO2015184228, WO2017158103; for TIL therapy: US2003194804, US20120244133, US20210220457, US20210189339, U.S. Pat. Nos. 5,126,132, and 11,083,752. Any of such methods or other similar methods can be used in connection with the present disclosure. In some embodiments, the provided methods are performed ex vivo during the process of manufacturing or preparing the T cells for adoptive transfer to a subject, such as using methods described in Section IV, and then the modified T cells are administered to the subject for treating a disease or disorder. In other embodiments, the provided methods are performed by administering to the subject a composition containing the DNA-targeting system or a polynucleotide or vector encoding the same in combination with adoptive transfer of a T cell therapy. In such methods, the composition containing the DNA-targeting system or a polynucleotide or vector encoding the same is administered prior to, simultaneously with or after administration of the adoptive T cell therapy.

[0370] In some embodiments, the disease, condition, or disorder to be treated is cancer, viral infection, autoimmune disease, or graft-versus-host disease. In some embodiments, the subject to be treated has undergone or is expected to undergo organ transplantation.

[0371] In some embodiments, the disease or condition to be treated is a cancer. In some embodiments, the cancer is a hematologic cancer. In some embodiments, the cancer is a B cell malignancy. In some embodiments, the cancer is a myeloma, a lymphoma or a leukemia. In some embodiments, the methods can be used to treat a non-Hodgkin lymphoma (NHL), an acute lymphoblastic leukemia (ALL), a chronic lymphocytic leukemia (CLL), a diffuse large B-cell lymphoma (DLBCL), acute myeloid leukemia (AML), or a myeloma, e.g., a multiple myeloma (MM).

[0372] In some embodiments, the cancer is a solid tumor cancer. In some embodiments, the cancer is a bladder, lung, brain, melanoma (e.g. small-cell lung, melanoma), breast, cervical, ovarian, colorectal, pancreatic, endometrial, esophageal, kidney, liver, prostate, skin, thyroid, or uterine cancers. In some embodiments, the cancer is a pancreatic cancer, bladder cancer, colorectal cancer, breast cancer, prostate cancer, renal cancer, hepatocellular cancer, lung cancer, ovarian cancer, cervical cancer, pancreatic cancer, rectal cancer, thyroid cancer, uterine cancer, gastric cancer, esophageal cancer, head and neck cancer, melanoma, neuroendocrine cancers, CNS cancers, brain tumors, bone cancer, or soft tissue sarcoma.

[0373] In some aspects, the provided methods can further include administering one or more lymphodepleting therapies, such as prior to or simultaneous with initiation of administration of the adoptive T cell therapy, such as a composition containing modified T cells provided herein. In some embodiments, the lymphodepleting therapy comprises administration of a phosphamide, such as cyclophosphamide. In some embodiments, the lymphodepleting therapy can include administration of fludarabine.

[0374] In some aspects, preconditioning subjects with immunodepleting (e.g., lymphodepleting) therapies can improve the effects of adoptive cell therapy (ACT). In some embodiments, the lymphodepleting therapy includes combinations of cyclosporine and fludarabine.

[0375] Thus in some embodiments, the provided method further involves administering a lymphodepleting therapy to the subject. In some embodiments, the method involves administering the lymphodepleting therapy to the subject prior to the administration of the dose of cells. In some embodiments, the lymphodepleting therapy contains a chemotherapeutic agent such as fludarabine and/or cyclophosphamide. In some embodiments, the administration of the cells and/or the lymphodepleting therapy is carried out via outpatient delivery.

[0376] In some embodiments, the methods include administering a preconditioning agent, such as a lymphodepleting or chemotherapeutic agent, such as cyclophosphamide, fludarabine, or combinations thereof, to a subject prior to the administration of the dose of cells. For example, the subject may be administered a preconditioning agent, such as a lymphodepleting or chemotherapeutic agent, such as cyclophosphamide, fludarabine, or combinations thereof, at least 2 days prior, such as at least 3, 4, 5, 6, or 7 days prior, to the first or subsequent dose. In some embodiments, the subject is administered a preconditioning agent, such as a lymphodepleting or chemotherapeutic agent, such as cyclophosphamide, fludarabine, or combinations thereof, no more than 7 days prior, such as no more than 6, 5, 4, 3, or 2 days prior, to the administration of the dose of cells. In some embodiments, the subject is administered a preconditioning agent, such as a lymphodepleting or chemotherapeutic agent, such as cyclophosphamide, fludarabine, or combinations thereof, no more than 14 days prior, such as no more than 13, 12, 11, 10, 9 or 8 days prior, to the administration of the dose of cells.

[0377] In some embodiments, the subject is preconditioned with cyclophosphamide at a dose between or between about 20 mg/kg and 100 mg/kg, such as between or between about 40 mg/kg and 80 mg/kg. In some aspects, the subject is preconditioned with or with about 60 mg/kg of cyclophosphamide. In some embodiments, the fludarabine can be administered in a single dose or can be administered in a plurality of doses, such as given daily, every other day or every three days. In some embodiments, the cyclophosphamide is administered once daily for one or two days.

[0378] In some embodiments, where the lymphodepleting agent comprises fludarabine, the subject is administered fludarabine at a dose between or between about 1 mg/m² and 100 mg/m², such as between or between about 10 mg/m² and 75 mg/m², 15 mg/m² and 50 mg/m², 20 mg/m² and 30 mg/m², or 24 mg/m² and 26 mg/m². In some instances, the subject is administered 25 mg/m² of fludarabine. In some embodiments, the fludarabine can be administered in a single dose or can be administered in a plurality of doses, such as given daily, every other day or every three days. In some embodiments, fludarabine is administered daily, such as for 1-5 days, for example, for 3 to 5 days.

[0379] In some embodiments, the lymphodepleting agent comprises a combination of agents, such as a combination of cyclophosphamide and fludarabine. Thus, the combination of agents may include cyclophosphamide at any dose or administration schedule, such as those described above, and fludarabine at any dose or administration schedule, such as those described above. For example, in some aspects, the subject is administered 60 mg/kg (˜2 g/m²) of cyclophosphamide and 3 to 5 doses of 25 mg/m² fludarabine prior to the dose of cells.

[0380] In some embodiments, prior to the administration of adoptive T cell therapy, such as a composition containing modified T cells described herein, the subject has received a lymphodepleting therapy. In some embodiments, the lymphodepleting therapy includes fludarabine and/or cyclophosphamide. In some embodiments, the lymphodepleting includes the administration of fludarabine at or about 20-40 mg/m² body surface area of the subject, optionally at or about 30 mg/m², daily, for 2-4 days, and/or cyclophosphamide at or about 200-400 mg/m² body surface area of the subject, optionally at or about 300 mg/m², daily, for 2-4 days.

[0381] In some embodiments, the lymphodepleting therapy includes fludarabine and cyclophosphamide. In some embodiments, the lymphodepleting therapy includes the administration of fludarabine at or about 30 mg/m² body surface area of the subject, daily, and cyclophosphamide at or about 300 mg/m² body surface area of the subject, daily, each for 2-4 days, optionally 3 days.

[0382] In some embodiments, the administration of the preconditioning agent prior to infusion of the dose of cells improves an outcome of the treatment. For example, in some aspects, preconditioning, such as a lymphodepleting or chemotherapeutic agent, such as cyclophosphamide, fludarabine, or combinations thereof, improves the efficacy of treatment with the dose or increases the persistence of the T cells in the subject. In some embodiments, preconditioning treatment increases disease-free survival, such as the percent of subjects that are alive and exhibit no minimal residual or molecularly detectable disease after a given period of time following the dose of cells. In some embodiments, the time to median disease-free survival is increased.

[0383] Once the cells are administered to the subject (e.g., human), the biological activity of the engineered cell populations in some aspects is measured by any of a number of known methods. Parameters to assess include specific binding of an engineered or natural T cell or other immune cell to antigen, in vivo, e.g., by imaging, or ex vivo, e.g., by ELISA or flow cytometry. In certain embodiments, the ability of the T cells to destroy target cells can be measured using any suitable method known in the art, such as cytotoxicity assays described in, for example, Kochenderfer et al., J. Immunotherapy, 32 (7): 689-702 (2009), and Herman et al. J. Immunological Methods, 285 (1): 25-40 (2004). In certain embodiments, the biological activity of the cells also can be measured by assaying expression and/or secretion of certain cytokines or other effector molecules, such as IFNγ and TNF.

[0384] In some aspects the biological activity is measured by assessing clinical outcome, such as reduction in tumor burden or load. In some aspects, toxic outcomes, persistence and/or expansion of the cells, and/or presence or absence of a host immune response, are assessed. In some embodiments, exemplary parameters for determination include particular clinical outcomes indicative of amelioration or improvement in the disease or condition, e.g., tumor. Such parameters include: duration of disease control, including complete response (CR), partial response (PR) or stable disease (SD) (see, e.g., Response Evaluation Criteria In Solid Tumors (RECIST) guidelines), objective response rate (ORR), progression-free survival (PFS) and overall survival (OS). Specific thresholds for the parameters can be set to determine the efficacy of the method of combination therapy provided herein.

### VI. KITS AND ARTICLES OF MANUFACTURE

[0385] Also provided are articles of manufacture, systems, apparatuses, and kits useful in performing the provided embodiments. In some embodiments, the provided articles of manufacture or kits contain any of the DNA-targeting systems described herein, any of the gRNAs described herein, any of the fusion proteins described herein, any of the polynucleotides described herein, any of the pluralities of polynucleotides described herein, any of the vectors described herein, any of the pluralities of vectors described herein, any of the cells (e.g. modified T cells) described herein, or a portion or a component of any of the foregoing, or any combination thereof. In some embodiments, the articles of manufacture or kits include polypeptides, polynucleotides, nucleic acids, vectors, and/or cells useful in performing the provided methods.

[0386] In some embodiments, the articles of manufacture or kits include one or more containers, typically a plurality of containers, packaging material, and a label or package insert on or associated with the container or containers and/or packaging, generally including instructions for use, e.g., instructions for introducing or administering.

[0387] Also provided are articles of manufacture, systems, apparatuses, and kits useful in administering the provided compositions, e.g., pharmaceutical compositions, e.g., for use in therapy or treatment. In some embodiments, the articles of manufacture or kits provided herein contain vectors and/or plurality of vectors, such as any vectors and/or plurality of vectors described herein. In some aspects, the articles of manufacture or kits provided herein can be used for administration of the vectors and/or plurality of vectors, and can include instructions for use.

[0388] The articles of manufacture and/or kits containing cells or cell compositions for therapy, may include a container and a label or package insert on or associated with the container. Suitable containers include, for example, bottles, vials, syringes, IV solution bags, etc. The containers may be formed from a variety of materials such as glass or plastic. The container in some embodiments holds a composition which is by itself or combined with another composition effective for treating, preventing and/or diagnosing the condition. In some embodiments, the container has a sterile access port. Exemplary containers include an intravenous solution bags, vials, including those with stoppers pierceable by a needle for injection, or bottles or vials for orally administered agents. The label or package insert may indicate that the composition is used for treating a disease or condition. The article of manufacture may further include a package insert indicating that the compositions can be used to treat a particular condition. Alternatively, or additionally, the article of manufacture may further include another or the same container comprising a pharmaceutically-acceptable buffer. It may further include other materials such as other buffers, diluents, filters, needles, and/or syringes.

### VII. DEFINITIONS

[0389] Unless defined otherwise, all terms of art, notations and other technical and scientific terms or terminology used herein are intended to have the same meaning as is commonly understood by one of ordinary skill in the art to which the claimed subject matter pertains. In some cases, terms with commonly understood meanings are defined herein for clarity and/or for ready reference, and the inclusion of such definitions herein should not necessarily be construed to represent a substantial difference over what is generally understood in the art.

[0390] As used herein, the singular forms “a,” “an,” and “the” include plural referents unless the context clearly dictates otherwise. For example, “a” or “an” means “at least one” or “one or more.” It is understood that aspects and variations described herein include “consisting” and/or “consisting essentially of” aspects and variations.

[0391] Throughout this disclosure, various aspects of the claimed subject matter are presented in a range format. It should be understood that the description in range format is merely for convenience and brevity and should not be construed as an inflexible limitation on the scope of the claimed subject matter. Accordingly, the description of a range should be considered to have specifically disclosed all the possible sub-ranges as well as individual numerical values within that range. For example, where a range of values is provided, it is understood that each intervening value, between the upper and lower limit of that range and any other stated or intervening value in that stated range is encompassed within the claimed subject matter. The upper and lower limits of these smaller ranges may independently be included in the smaller ranges, and are also encompassed within the claimed subject matter, subject to any specifically excluded limit in the stated range. Where the stated range includes one or both of the limits, ranges excluding either or both of those included limits are also included in the claimed subject matter. This applies regardless of the breadth of the range.

[0392] The term “about” as used herein refers to the usual error range for the respective value readily known. Reference to “about” a value or parameter herein includes (and describes) embodiments that are directed to that value or parameter per se. For example, description referring to “about X” includes description of “X”. In some embodiments, “about” may refer to ±25%, ±20%, ±15%, ±10%, ±5%, or ±1%.

[0393] As used herein, recitation that nucleotides or amino acid positions “correspond to” nucleotides or amino acid positions in a disclosed sequence, such as set forth in the Sequence listing, refers to nucleotides or amino acid positions identified upon alignment with the disclosed sequence to maximize identity using a standard alignment algorithm, such as the GAP algorithm. By aligning the sequences, corresponding residues can be identified, for example, using conserved and identical amino acid residues as guides. In general, to identify corresponding positions, the sequences of amino acids are aligned so that the highest order match is obtained (see, e.g.: Computational Molecular Biology, Lesk, A. M., ed., Oxford University Press, New York, 1988; Biocomputing: Informatics and Genome Projects, Smith, D. W., ed., Academic Press, New York, 1993; Computer Analysis of Sequence Data, Part I, Griffin, A. M., and Griffin, H. G., eds., Humana Press, New Jersey, 1994; Sequence Analysis in Molecular Biology, von Heinje, G., Academic Press, 1987; and Sequence Analysis Primer, Gribskov, M. and Devereux, J., eds., M Stockton Press, New York, 1991; Carrillo et al. (1988) SIAM J Applied Math 48:1073).

[0394] A “gene,” includes a DNA region encoding a gene product, as well as all DNA regions which regulate the production of the gene product, whether or not such regulatory sequences are adjacent to coding and/or transcribed sequences. Accordingly, a gene includes, but is not necessarily limited to, promoter sequences, terminators, translational regulatory sequences such as ribosome binding sites and internal ribosome entry sites, enhancers, silencers, insulators, boundary elements, replication origins, matrix attachment sites and locus control regions. The sequence of a gene is typically present at a fixed chromosomal position or locus on a chromosome in the cell.

[0395] A “regulatory element” or “DNA regulatory element,” which terms are used interchangeably herein, in reference to a gene refers to DNA regions which regulate the production of a gene product, whether or not such regulatory sequences are adjacent to coding and/or transcribed sequences. Accordingly, a regulatory element includes, but is not necessarily limited to, promoter sequences, terminators, translational regulatory sequences such as ribosome binding sites and internal ribosome entry sites, enhancers, silencers, insulators, boundary elements, replication origins, matrix attachment sites and locus control regions.

[0396] As used herein, a “target site” or “target nucleic acid sequence” is a nucleic acid sequence that defines a portion of a nucleic acid to which a binding molecule (e.g. a DNA-targeting domain disclosed herein) will bind, provided sufficient conditions for binding exist.

[0397] The term “expression” with reference to a gene or “gene expression” refers to the conversion of the information, contained in a gene, into a gene product. A gene product can be the direct transcriptional product of a gene (e.g., mRNA, tRNA, rRNA, antisense RNA, ribozyme, structural RNA or any other type of RNA) or can be a protein produced by translation of an mRNA. Gene products also include RNAs which are modified, by processes such as capping, polyadenylation, methylation, and editing, and proteins modified by, for example, methylation, acetylation, phosphorylation, ubiquitination, ADP-ribosylation, myristoylation, and glycosylation. Hence, reference to expression or gene expression includes protein (or polypeptide) expression or expression of a transcribable product of or a gene such as mRNA. The protein expression may include intracellular expression or surface expression of a protein. Typically, expression of a gene product, such as mRNA or protein, is at a level that is detectable in the cell.

[0398] As used herein, a “detectable” expression level, means a level that is detectable by standard techniques known to a skilled artisan, and include for example, differential display, RT (reverse transcriptase)-coupled polymerase chain reaction (PCR), Northern Blot, and/or RNase protection analyses as well as immunoaffinity-based methods for protein detection, such as flow cytometry, ELISA, or western blot. The degree of expression levels need only be large enough to be visualized or measured via standard characterization techniques.

[0399] As used herein, the term “reduced expression” or “decreased expression” means any form of expression that is lower than the expression in an original or source cell that does not contain the modification for modulating a particular gene expression by a DNA-targeting system, for instance a wild-type expression level (which can be absence of expression or immeasurable expression as well). Reference herein to “reduced expression,” or “decreased expression” is taken to mean a decrease in gene expression relative to the level in a cell that does not contain the modification, such as the original source cell prior to contacting with, or engineering to introduce, the DNA-binding system into the T cell, such as an unmodified cell or a wild-type T cell. The decrease in expression can be at least 5%, 10%, 20%, 30%, 40% or 50%, 60%, 70%, 80%, 85%, 90%, or 100% or even more. In some cases, the decrease in expression can be at least 2-fold, 5-fold, 10-fold, 20-fold, 30-fold, 40-fold, 50-fold, 60-fold, 70-fold, 80-fold, 90-fold, 100-fold, 200-fold or more.

[0400] As used herein, the term “reduced transcription” or “decreased transcription” refers to the level of transcription of a gene that is lower than the transcription of the gene in an original or source cell that does not contain the modification for modulating transcription by a DNA-targeting system, for instance a wild-type transcription level of a gene. Reference to reduced transcription or decreased transcription can refer to reduction in the levels of a transcribable product of a gene such as mRNA. Any of a variety of methods can be used to monitor or quantitate a level of a transcribable product such as mRNA, including but not limited to, real-time quantitative RT (reverse transcriptase)-polymerase chain reaction (qRT-PCR), Northern Blot, microarray analysis, or RNA sequencing (RNA-Seq). The reduction in transcription can be at least 5%, 10%, 20%, 30%, 40% or 50%, 60%, 70%, 80%, 85%, 90%, or 100% or even more. In some cases, the reduction in transcription can be at least 2-fold, 5-fold, 10-fold, 20-fold, 30-fold, 40-fold, 50-fold, 60-fold, 70-fold, 80-fold, 90-fold, 100-fold, 200-fold or more.

[0401] As used herein, an “epigenetic modification” refers to changes in the gene expression that are not caused by changes in the DNA sequences but are due to events like DNA methylations, histone modifications, miRNA expression modulation.

[0402] As used herein, the term “modification” or “modified” with reference to a T cell refers to any change or alteration in a cell that impacts gene expression in the cell. In some embodiments, the modification is an epigenetic modification that directly changes the epigenetic state of a gene or regulatory elements thereof to alter (e.g. decrease) expression of a gene product. In some embodiments, a modification described herein results in decreased expression of a target gene or selected polynucleotide sequence.

[0403] As used herein, a “fusion” molecule is a molecule in which two or more subunit molecules are linked, such as covalently. Examples of a fusion molecule include, but are not limited to, fusion proteins (for example, a fusion between a DNA-binding domain such as a ZFP, TALE DNA-binding domain or CRISPR-Cas protein and one or more effector domains). The fusion molecule also may be part of a system in which a polynucleotide component associates with a polypeptide component to form a functional molecule (e.g., a CRISPR/Cas system in which a single guide RNA associates with a functional domain to modulate gene expression). Fusion molecules also include fusion nucleic acids, for example, a nucleic acid encoding the fusion protein. Expression of a fusion protein in a cell can result from delivery of the fusion protein to the cell or by delivery of a polynucleotide encoding the fusion protein to a cell, where the polynucleotide is transcribed, and the transcript is translated, to generate the fusion protein.

[0404] The term “vector,” as used herein, refers to a nucleic acid molecule capable of propagating another nucleic acid to which it is linked. The term includes the vector as a self-replicating nucleic acid structure as well as the vector incorporated into the genome of a host cell into which it has been introduced. Certain vectors are capable of directing the expression of nucleic acids to which they are operatively linked. Such vectors are referred to herein as “expression vectors.” Among the vectors are viral vectors, such as adenoviral vectors or lentiviral vectors.

[0405] The term “expression vector” refers to a vector comprising a recombinant polynucleotide comprising expression control sequences operatively linked to a nucleotide sequence to be expressed. An expression vector comprises sufficient cis-acting elements for expression; other elements for expression can be supplied by the host cell or in an in vitro expression system. Expression vectors include, but are not limited to, cosmids, plasmids (e.g., naked or contained in liposomes) and viruses (e.g., lentiviruses, retroviruses, adenoviruses, and adeno-associated viruses) that incorporate the recombinant polynucleotide.

[0406] The term “isolated” means altered or removed from the natural state. For example, a nucleic acid or a peptide naturally present in a living animal is not “isolated,” but the same nucleic acid or peptide partially or completely separated from the coexisting materials of its natural state is “isolated.” An isolated nucleic acid or protein can exist in substantially purified form, or can exist in a non-native environment such as, for example, a host cell.

[0407] The term “polynucleotide” refers to a chain of nucleotides. Furthermore, nucleic acids are polymers of nucleotides. Thus, nucleic acids and polynucleotides as used herein are interchangeable. One skilled in the art has the general knowledge that nucleic acids are polynucleotides, which can be hydrolyzed into the monomelic “nucleotides.” The monomelic nucleotides can be hydrolyzed into nucleosides. As used herein polynucleotides include, but are not limited to, all nucleic acid sequences which are obtained by any means available in the art, including, without limitation, recombinant means, i.e., the cloning of nucleic acid sequences from a recombinant library or a cell genome, using ordinary cloning technology and PCR™, and the like, and by synthetic means.

[0408] As used herein, the terms “peptide,” “polypeptide,” and “protein” are used interchangeably, and refer to a compound comprised of amino acid residues covalently linked by peptide bonds. A protein or peptide must contain at least two amino acids, and no limitation is placed on the maximum number of amino acids that can comprise a protein's or peptide's sequence. Polypeptides include any peptide or protein comprising two or more amino acids joined to each other by peptide bonds. As used herein, the term refers to both short chains, which also commonly are referred to in the art as peptides, oligopeptides and oligomers, for example, and to longer chains, which generally are referred to in the art as proteins, of which there are many types. “Polypeptides” include, for example, biologically active fragments, substantially homologous polypeptides, oligopeptides, homodimers, heterodimers, variants of polypeptides, modified polypeptides, derivatives, analogs, fusion proteins, among others. The polypeptides include natural peptides, recombinant peptides, synthetic peptides, or a combination thereof.

[0409] As used herein, “percent (%) amino acid sequence identity” and “percent identity” when used with respect to an amino acid sequence (reference polypeptide sequence) is defined as the percentage of amino acid residues in a candidate sequence (e.g., the subject antibody or fragment) that are identical with the amino acid residues in the reference polypeptide sequence, after aligning the sequences and introducing gaps, if necessary, to achieve the maximum percent sequence identity, and not considering any conservative substitutions as part of the sequence identity. Alignment for purposes of determining percent amino acid sequence identity can be achieved in various known ways, in some embodiments, using publicly available computer software such as BLAST, BLAST-2, ALIGN or Megalign (DNASTAR) software. Appropriate parameters for aligning sequences can be determined, including any algorithms needed to achieve maximal alignment over the full length of the sequences being compared.

[0410] In some embodiments, “operably linked” may include the association of components, such as a DNA sequence, (e.g. a heterologous nucleic acid) and a regulatory sequence(s), in such a way as to permit gene expression when the appropriate molecules (e.g. transcriptional repressor proteins) are bound to the regulatory sequence. Hence, it means that the components described are in a relationship permitting them to function in their intended manner.

[0411] An amino acid substitution may include replacement of one amino acid in a polypeptide with another amino acid. The substitution may be a conservative amino acid substitution or a non-conservative amino acid substitution. Amino acid substitutions may be introduced into a binding molecule, e.g., antibody, of interest and the products screened for a desired activity, e.g., retained/improved antigen binding, decreased immunogenicity, or improved ADCC or CDC.

[0412] Amino acids generally can be grouped according to the following common side-chain properties:
[0413] (1) hydrophobic: Norleucine, Met, Ala, Val, Leu, Ile;
[0414] (2) neutral hydrophilic: Cys, Ser, Thr, Asn, Gln;
[0415] (3) acidic: Asp, Glu;
[0416] (4) basic: His, Lys, Arg;
[0417] (5) residues that influence chain orientation: Gly, Pro;
[0418] (6) aromatic: Trp, Tyr, Phe.

[0419] In some embodiments, conservative substitutions can involve the exchange of a member of one of these classes for another member of the same class. In some embodiments, non-conservative amino acid substitutions can involve exchanging a member of one of these classes for another class.

[0420] As used herein, a composition refers to any mixture of two or more products, substances, or compounds, including cells. It may be a solution, a suspension, liquid, powder, a paste, aqueous, non-aqueous or any combination thereof.

[0421] As used herein, a “subject” or an “individual,” which are terms that are used interchangeably, is a mammal. In some embodiments, a “mammal” includes humans, non-human primates, domestic and farm animals, and zoo, sports, or pet animals, such as dogs, horses, rabbits, cattle, pigs, hamsters, gerbils, mice, ferrets, rats, cats, monkeys, etc. In some embodiments, the subject or individual is human. In some embodiments, the subject is a patient that is known or suspected of having a disease, disorder or condition.

[0422] As used herein, the term “treating” and “treatment” includes administering to a subject an effective amount of cells (e.g. T cells), such as such cells that have been modified by a DNA-targeting system or polynucleotide(s) encoding the DNA-targeting system described herein, so that the subject has a reduction in at least one symptom of the disease or an improvement in the disease, for example, beneficial or desired clinical results. For purposes of this technology, beneficial or desired clinical results include, but are not limited to, alleviation of one or more symptoms, diminishment of extent of disease, stabilized (i.e., not worsening) state of disease, delay or slowing of disease progression, amelioration or palliation of the disease state, and remission (whether partial or total), whether detectable or undetectable. Treating can refer to prolonging survival as compared to expected survival if not receiving treatment. Thus, one of skill in the art realizes that a treatment may improve the disease condition, but may not be a complete cure for the disease. In some embodiments, one or more symptoms of a disease or disorder are alleviated by at least 5%, at least 10%, at least 20%, at least 30%, at least 40%, or at least 50% upon treatment of the disease.

[0423] The term “therapeutically effective amount” refers to the amount of the subject compound that will elicit the biological or medical response of a tissue, system, or subject that is being sought by the researcher, veterinarian, medical doctor or other clinician. The term “therapeutically effective amount” includes that amount of a biological molecule, such as a compound or cells, that, when administered, is sufficient to prevent development of, or alleviate to some extent, one or more of the signs or symptoms of the disorder or disease being treated. The therapeutically effective amount will vary depending on the biological molecule, the disease and its severity and the age, weight, etc., of the subject to be treated.

[0424] As used herein, “adoptive cell therapy” (ACT) refers to the administration of T cells targeting a specific antigen to a subject.

[0425] As used herein, the term “autologous” is meant to refer to any material derived from the same individual to which it is later to be re-introduced into the individual.

[0426] “Allogeneic” refers to a graft derived from a different animal of the same species

### VIII. EXEMPLARY EMBODIMENTS

[0427] Among the provided embodiments are:

[0428] 1. An epigenetic-modifying DNA-targeting system,
[0429] said DNA-targeting system comprising a fusion protein comprising:
[0430] (a) a DNA-targeting domain capable of being targeted to a target site in a gene or regulatory DNA element thereof in a T cell; and
[0431] (b) at least one effector domain capable of reducing transcription of the gene; wherein reduced transcription of the gene promotes a stem cell-like memory T-cell phenotype.

[0432] 2. The epigenetic-modifying DNA-targeting system of embodiment 1, wherein the DNA-targeting system is not able to introduce a genetic disruption or a DNA break at or near the target site.

[0433] 3. The epigenetic-modifying DNA-targeting system of embodiment 1 or embodiment 2, wherein the DNA-targeting domain comprises a Clustered Regularly Interspaced Short Palindromic Repeats associated (Cas)-guide RNA (gRNA) combination comprising (a) a Cas protein or a variant thereof and (b) at least one gRNA; a zinc finger protein (ZFP); a transcription activator-like effector (TALE); a meganuclease; a homing endonuclease; or an I-SceI enzyme or a variant thereof, optionally wherein the DNA-targeting domain comprises a catalytically inactive variant of any of the foregoing.

[0434] 4. The epigenetic-modifying DNA-targeting system of any of embodiments 1-3, wherein the DNA-targeting domain comprises a Cas-gRNA combination comprising (a) a Cas protein or a variant thereof and (b) at least one gRNA.

[0435] 5. An epigenetic-modifying DNA-targeting system,
[0436] said DNA-targeting system comprising:
[0437] (a) a fusion protein comprising a Clustered Regularly Interspaced Short Palindromic Repeats associated (Cas) protein or variant thereof and at least one effector domain capable of reducing transcription of a gene is a T cell; and
[0438] (b) at least one gRNA that targets the Cas protein or variant thereof of the fusion protein to a target site in the gene or regulatory DNA element thereof, wherein reduced transcription of the gene promotes a stem cell-like memory T-cell phenotype.

[0439] 6. The epigenetic-modifying DNA-targeting system of any of embodiments 1-5, wherein the stem cell-like memory T cell phenotype comprises one or more cell-surface markers selected from CCR7+, CD27+, CD45RA+, CD45RO−, CCR7+, CD62L+, CD28+, CD27+, IL-7Rα+, CXCR3+, CD95+, CD11a+, IL-2Rβ+, CD58+, and CD57−, or combinations thereof.

[0440] 7. The epigenetic-modifying DNA-targeting system of any of embodiments 1-6, wherein the stem cell-like memory T cell phenotype comprises expression of CCR7 and/or CD27.

[0441] 8. The epigenetic-modifying DNA-targeting system of any of embodiments 1-7, wherein the stem cell-like memory T cell phenotype comprises expression of CCR7 and CD27.

[0442] 9. The epigenetic-modifying DNA-targeting system of any of embodiments 1-8, wherein the stem cell-like memory T cell phenotype is characterized by polyfunctional activity of the T cells to produce two or more cytokines following stimulation of the T cell with a stimulatory agent, optionally wherein the two or more cytokines are selected from among interferon-gamma (IFN-gamma), interleukin 2 (IL-2), and TNF-alpha.

[0443] 10. The epigenetic-modifying DNA-targeting system of any of embodiments 3-9, wherein at least one gRNA is capable of complexing with the Cas protein or variant thereof, and targeting the Cas protein or the variant thereof to the target site.

[0444] 11. The epigenetic-modifying DNA-targeting system of any of embodiments 3-10, wherein the at least one gRNA comprises a gRNA spacer sequence that is capable of hybridizing to the target site or is complementary to the target site.

[0445] 12. The epigenetic-modifying DNA-targeting system of any of embodiments 3-11, wherein the Cas protein or a variant thereof is a Cas9 protein or a variant thereof.

[0446] 13. The epigenetic-modifying DNA-targeting system of any of embodiments 3-11, wherein the Cas protein or a variant thereof is a Cas12 protein or a variant thereof.

[0447] 14. The epigenetic-modifying DNA-targeting system of any of embodiments 3-12, wherein the Cas protein or a variant thereof is a variant Cas protein, wherein the variant Cas protein lacks nuclease activity or is a deactivated Cas (dCas) protein.

[0448] 15. The epigenetic-modifying DNA-targeting system of embodiment 14, wherein the variant Cas protein is a variant Cas9 protein that lacks nuclease activity or that is a deactivated Cas9 (dCas9) protein.

[0449] 16. The epigenetic-modifying DNA-targeting system of embodiment 12, wherein the Cas9 protein or a variant thereof is a Staphylococcus aureus Cas9 (SaCas9) protein or a variant thereof.

[0450] 17. The epigenetic-modifying DNA-targeting system of embodiment 15, wherein the variant Cas9 is a Staphylococcus aureus dCas9 protein (dSaCas9) that comprises at least one amino acid mutation selected from D10A and N580A, with reference to numbering of positions of SEQ ID NO: 1461.

[0451] 18. The epigenetic-modifying DNA-targeting system of embodiment 15 or embodiment 17, wherein the variant Cas9 protein comprises the sequence set forth in SEQ ID NO: 1462, or an amino acid sequence that has at least 90%, 91%, 92%, 93%, 94%, 95%, 96%, 97%, 98%, or 99% sequence identity thereto.

[0452] 19. The epigenetic-modifying DNA-targeting system of embodiment 12, wherein the Cas9 protein or variant thereof is a Streptococcus pyogenes Cas9 (SpCas9) protein or a variant thereof.

[0453] 20. The epigenetic-modifying DNA-targeting system of any of embodiment 15, wherein the variant Cas9 is a Streptococcus pyogenes dCas9 (dSpCas9) protein that comprises at least one amino acid mutation selected from D10A and H840A, with reference to numbering of positions of SEQ ID NO: 1463.

[0454] 21. The epigenetic-modifying DNA-targeting system of embodiment 15 or embodiment 20, wherein the variant Cas9 protein comprises the sequence set forth in SEQ ID NO: 1464, or an amino acid sequence that has at least 90%, 91%, 92%, 93%, 94%, 95%, 96%, 97%, 98%, or 99% sequence identity thereto.

[0455] 22. The epigenetic-modifying DNA-targeting system of any of embodiments 1-21, wherein the regulatory DNA element is an enhancer or a promoter.

[0456] 23. The epigenetic-modifying DNA-targeting system of any of embodiments 1-22, wherein the gene is a DNA-binding gene.

[0457] 24. The DNA-targeting system of any of embodiments 1-23, wherein the gene is selected from the list consisting of: BMP4, E2F7, ESRRG, LYL1, STAT5A, THAP10, ZNF362, ZSCAN1, ANHX, CPEB1, CSRNP1, EN2, EPAS1, IRX3, LHX8, NR5A2, PRDM16, RAX2, SCML4, SMAD1, SOX6, SUV39H1, TFDP1, ZNF287, ZNF438, ZNF681, ZNF853, BMP4, CARF, ESRRG, ESRRG, FOXR2, HOXA7, IRF9, KAT5, KLF5, NEUROD1, PAX6, PIN1, PURG, RARA, SNAPC5, STAT5A, TBX22, WT1, ZNF138, ZNF143, ZNF205, ZNF235, ZNF526, ZNF548, ZNF559, ZNF611, ZNF655, ZNF672, ZNF699, ZNF706, ZNF714, ZNF772, ZNF782, ZSCAN1, ZSCAN26, ADNP, AHRR, AKNA, ALX3, ALX4, AR, ARHGAP35, ARID3C, ARID5B, ASCL5, ATF6B, ATOH7, BARHL1, BARHL2, BATF, BBX, BHLHE40, BNC2, BRD4, BRD9, BSX, CCDC17, CDX1, CDX2, CDX4, CEBPB, CENPB, CLOCK, CREB3, CREB3L4, CSRNP3, CTCF, CUX1, CUX2, DACH2, DLX1, DLX4, DLX5, DLX6, DMRTB1, DNMT3B, DOTIL, DPF1, DR1, E2F2, E2F3, EBF3, EGR2, EHF, ELF5, ELMSAN1, EMX1, ETS2, ETV4, ETV4, ETV6, EZH1, FERD3L, FERD3L, FIZ1, FOS, FOSB, FOXA1, FOXA2, FOXA3, FOXC2, FOXD3, FOXE1, FOXJ3, FOXN2, FOXN4, FOXO1, FOXP3, FOXS1, GATA2, GATA3, GATAD2A, GCM2, GFI1, GLI2, GLYR1, GPBP1L1, GRHL1, GTF2B, GTF2I, HDAC2, HES2, HES7, HESX1, HEY1, HIF3A, HIVEP3, HLF, HLX, HMG20A, HMGA2, HMGN3, HMX2, HNF1A, HNF4G, HOXA1, HOXA11, HOXB1, HOXB2, HOXB3, HOXC12, HOXC9, HOXC9, HOXD9, HSF4, HSF5, IKZF1, IKZF2, IKZF3, IKZF4, IRF7, IRX3, ISL2, JRK, JRKL, KAT7, KDM1A, KDM2B, KDM5D, KLF14, KLF9, KMT2B, L3MBTL4, LEF1, LHX6, LHX9, LIN28A, LIN28A, LMX1A, MAF, MAFF, MBD3, MBD4, MBNL2, MED1, MED14, MED23, MED24, MEF2C, MEF2D, MEIS3, MESP1, MGA, MITF, MLX, MNX1, MYF5, MYOG, MYPOP, MYRFL, MYT1L, NCOR1, NEUROG1, NFAT5, NFATC2, NFATC3, NFE2L1, NFE2L3, NFIA, NFYB, NKX1-2, NKX2-3, NKX2-4, NKX2-5, NOTCH3, NOTO, NR1H2, NR1H4, NR112, NR2C2, NR2F1, OSR2, OTX1, OVOL1, PA2G4, PATZ1, PAX9, PAX9, PBX4, PGR, PITX1, PITX3, POU2F2, POU3F1, POU3F2, POU3F3, POU5F1, PRDM1, PRDM7, PRR12, PRRX1, RBCK1, RHOXF1, RUNX2, SALL3, SIM1, SIX1, SIX6, SKI, SKIL, SKOR1, SMAD2, SMAD5, SMYD3, SNAPC2, SOX1, SOX14, SOX30, SOX5, SOX6, SP2, SP3, SP5, SP8, SP9, SPIB, STAT5B, T, TBPL1, TBX5, TBX6, TCF12, TCF23, TCF3, TFAP2A, TFAP2E, TFDP2, TFDP3, TGIF2, TGIF2LX, THAP6, THRA, TIGD1, TIGD3, TIGD5, TLX3, TOX, TOX2, TRIM27, TRIM27, TRIM40, TRIM52, TSHZ2, VAX1, VEGFA, VSX1, WNT1, WNT3A, YBX1, YY1, YY2, ZBED5, ZBTB2, ZBTB21, ZBTB38, ZBTB4, ZBTB40, ZBTB42, ZBTB49, ZBTB7B, ZBTB7C, ZBTB8B, ZBTB9, ZC3H8, ZEB2, ZFHX2, ZFHX3, ZFP28, ZFP41, ZFP69B, ZFP90, ZGLP1, ZHX3, ZIC5, ZKSCAN1, ZKSCAN2, ZKSCAN7, ZNF107, ZNF121, ZNF132, ZNF135, ZNF140, ZNF141, ZNF222, ZNF225, ZNF229, ZNF230, ZNF248, ZNF25, ZNF26, ZNF267, ZNF280C, ZNF281, ZNF283, ZNF286B, ZNF304, ZNF317, ZNF318, ZNF320, ZNF33B, ZNF346, ZNF358, ZNF367, ZNF382, ZNF383, ZNF385B, ZNF391, ZNF415, ZNF423, ZNF43, ZNF432, ZNF433, ZNF436, ZNF441, ZNF443, ZNF461, ZNF462, ZNF468, ZNF473, ZNF483, ZNF486, ZNF491, ZNF507, ZNF514, ZNF519, ZNF540, ZNF543, ZNF546, ZNF549, ZNF555, ZNF562, ZNF567, ZNF569, ZNF574, ZNF577, ZNF596, ZNF610, ZNF616, ZNF621, ZNF626, ZNF627, ZNF629, ZNF630, ZNF630, ZNF641, ZNF645, ZNF658, ZNF660, ZNF662, ZNF677, ZNF682, ZNF697, ZNF703, ZNF705A, ZNF705B, ZNF705G, ZNF716, ZNF729, ZNF750, ZNF75A, ZNF765, ZNF771, ZNF773, ZNF774, ZNF778, ZNF784, ZNF789, ZNF804B, ZNF816, ZNF823, ZNF83, ZNF831, ZNF846, ZNF852, ZNF879, ZNF91, ZNF93, ZNF99, ZNF99, ZSCAN16, ZSCAN2, ZSCAN21, ZSCAN5A, and ZSCAN5B.

[0458] 25. The epigenetic-modifying DNA-targeting system of any of embodiments 1-24, wherein the target site comprises the sequence set forth in any one of SEQ ID NOS: 1-484, a contiguous portion thereof of at least 14 nucleotides (nt), or a complementary sequence of any of the foregoing.

[0459] 26. The epigenetic-modifying DNA-targeting system of any of embodiments 3-25, wherein the at least one gRNA comprises a gRNA spacer sequence comprising the sequence set forth in SEQ ID NO: 485-968, or a contiguous portion thereof of at least 14 nt.

[0460] 27. The epigenetic-modifying DNA-targeting system of embodiment 26, wherein the at least one gRNA further comprises the sequence set forth in SEQ ID NO: 1454.

[0461] 28. The epigenetic-modifying DNA-targeting system of any of embodiments 3-27, wherein the at least one gRNA comprises a gRNA that comprises the sequence set forth in any one of SEQ ID NOS: 969-1452, optionally wherein the at least one gRNA is the gRNA set forth in any one of SEQ ID NOS: 969-1452.

[0462] 29. The epigenetic-modifying DNA-targeting system of any of embodiments 1-24, wherein the gene is selected from the list consisting of: BMP4, E2F7, ESRRG, LYL1, STAT5A, THAP10, ZNF362, ZSCAN1, ANHX, CPEB1, CSRNP1, EN2, EPAS1, IRX3, LHX8, NR5A2, PRDM16, RAX2, SCML4, SMAD1, SOX6, SUV39H1, TFDP1, ZNF287, ZNF438, ZNF681, and ZNF853.

[0463] 30. The epigenetic-modifying DNA-targeting system of any of embodiments 1-24 and 29, wherein the target site comprises the sequence set forth in any one of SEQ ID NOS: 1-27, a contiguous portion thereof of at least 14 nucleotides (nt), or a complementary sequence of any of the foregoing.

[0464] 31. The epigenetic-modifying DNA-targeting system of any of embodiments 3-24, 29 and 30, wherein the at least one gRNA comprises a gRNA spacer sequence comprising the sequence set forth in SEQ ID NO: 485-511, or a contiguous portion thereof of at least 14 nt.

[0465] 32. The epigenetic-modifying DNA-targeting system of embodiment 31, wherein the at least one gRNA further comprises the sequence set forth in SEQ ID NO: 1454.

[0466] 33. The epigenetic-modifying DNA-targeting system of any of embodiments 3-24 and 29-32, wherein the at least one gRNA comprises a gRNA that comprises the sequence set forth in any one of SEQ ID NOS: 969-995, optionally wherein the at least one gRNA is the gRNA set forth in any one of SEQ ID NOS: 969-995.

[0467] 34. The epigenetic-modifying DNA-targeting system of any of embodiments 1-24, wherein the gene is selected from the list consisting of: BMP4, E2F7, ESRRG, LYL1, STAT5A, THAP10, ZNF362, and ZSCAN1.

[0468] 35. The DNA-targeting system of any of embodiments 1-24 and 34, wherein the target site comprises the sequence set forth in any one of SEQ ID NOS: 1-8, a contiguous portion thereof of at least 14 nucleotides (nt), or a complementary sequence of any of the foregoing.

[0469] 36. The DNA-targeting system of any of embodiments 3-24, 34 and 35, wherein the at least one gRNA comprises a gRNA spacer sequence comprising the sequence set forth in SEQ ID NO: 485-492, or a contiguous portion thereof of at least 14 nt.

[0470] 37. The DNA-targeting system of embodiment 36, wherein the at least one gRNA further comprises the sequence set forth in SEQ ID NO: 1454.

[0471] 38. The DNA-targeting system of any of embodiments 3-24 and 34-37, wherein the at least one gRNA comprises a gRNA that comprises the sequence set forth in any one of SEQ ID NOS: 969-976, optionally wherein the at least one gRNA is the gRNA set forth in any one of SEQ ID NOS: 969-976.

[0472] 39. The DNA-targeting system of any of embodiments 3-38, wherein the gRNA spacer sequence is between 14 nt and 24 nt, or between 16 nt and 22 nt in length.

[0473] 40. The DNA-targeting system of any of embodiments 3-39, wherein the gRNA spacer sequence is 18 nt, 19 nt, 20 nt, 21 nt or 22 nt in length.

[0474] 41. The DNA-targeting system of any of embodiments 3-40, wherein the gRNA comprises modified nucleotides for increased stability.

[0475] 42. The DNA-targeting system of any of embodiments 1-32, wherein the at least one effector domain induces, catalyzes, or leads to transcription repression, transcription co-repression, or reduced transcription of the gene.

[0476] 43. The DNA-targeting system of any of embodiments 1-42, wherein the at least one effector domain induces transcription repression.

[0477] 44. The DNA-targeting system of any of embodiments 1-43, wherein the at least one effector domain comprises a KRAB domain or a variant thereof.

[0478] 45. The DNA-targeting system of any of embodiments 1-44, wherein the at least one effector domain comprises the sequence set forth in SEQ ID NO: 1465, a portion thereof, or an amino acid sequence that has at least 90%, 91%, 92%, 93%, 94%, 95%, 96%, 97%, 98%, or 99% sequence identity to any of the foregoing.

[0479] 46. The DNA-targeting system of any of embodiments 1-35, wherein at least one effector domain is selected from a ERF repressor domain, Mxi1 repressor domain, SID4X repressor domain, Mad-SID repressor domain. LSD1 repressor domain, or DNMT3A, DNMT3A-3L, DNMT3B domain binding protein or LSD1 repressor domain, or variant of any of the foregoing.

[0480] 47. The DNA-targeting system of any of embodiments 1-35 and 46, wherein at least one effector domain comprises a sequence selected from any one of SEQ ID NOS: 1465, 1488-1495, or a domain thereof, a portion thereof, or an amino acid sequence that has at least 90%, 91%, 92%, 93%, 94%, 95%, 96%, 97%, 98%, or 99% sequence identity to any of the foregoing.

[0481] 48. The DNA-targeting system of any of embodiments 1-47, wherein the at least one effector domain is fused to the N-terminus, the C-terminus, or both the N-terminus and the C-terminus, of the DNA-targeting domain or a component thereof.

[0482] 49. The DNA-targeting system of any of embodiments 1-48, further comprising one or more nuclear localization signals (NLS).

[0483] 50. The DNA-targeting system of embodiment 49, further comprising one or more linkers connecting two or more of: the DNA-targeting domain, the at least one effector domain, and the one or more nuclear localization signals.

[0484] 51. The DNA-targeting system of any of embodiments 1-50, wherein the fusion protein comprises the sequence set forth in SEQ ID NO: 1458, or an amino acid sequence that has at least 90%, 91%, 92%, 93%, 94%, 95%, 96%, 97%, 98%, or 99% sequence identity thereto.

[0485] 52. The DNA-targeting system of any one of embodiments 1-51, wherein reduced transcription of the gene further promotes increased production of IL-2 by the T cell.

[0486] 53. The DNA-targeting system of any of embodiments 3-52, wherein the epigenetic-modifying DNA-targeting system reduces expression of the gene in a T cell by a log 2 fold-change of at or lesser than −1.0.

[0487] 54. The DNA-targeting system of any of embodiments 3-53, wherein the epigenetic-modifying DNA-targeting system reduces surface expression of a T cell exhaustion marker selected from the group consisting of PD-1, CTLA-4, TIM-3, TOX, LAG-3, BTLA, 2B4, CD160, CD39, VISTA, and TIGIT.

[0488] 55. A guide RNA (gRNA) that binds a target site in a gene or regulatory DNA element thereof in a T cell, wherein reduced transcription of the gene, when targeted by an epigenetic-modifying DNA-targeting system comprising the gRNA, promotes a stem cell-like memory T cell phenotype.

[0489] 56. The gRNA of embodiment 55, wherein the stem cell-like memory T cell phenotype comprises one or more cell-surface markers selected from CCR7+, CD27+, CD45RA+, CD45RO−, CCR7+, CD62L+, CD28+, CD27+, IL-7Rα+, CXCR3+, CD95+, CD11a+, IL-2Rß+, CD58+, and CD57−.

[0490] 57. The gRNA of embodiment 55 or embodiment 56, wherein the stem cell-like memory T cell phenotype comprises expression of CCR7 and/or CD27.

[0491] 58. The gRNA of embodiment 55 or embodiment 56, wherein the stem cell-like memory T cell phenotype comprises expression of CCR7 and/or CD27.

[0492] 59. The gRNA of any of embodiments 55-58, wherein the stem cell-like memory T cell phenotype is characterized by polyfunctional activity of the T cells to produce two or more cytokines following stimulation of the T cell with a stimulatory agent, optionally wherein the two or more cytokines are selected from among interferon-gamma (IFN-gamma), interleukin 2 (IL-2), and TNF-alpha.

[0493] 60. The gRNA of any of embodiments 55-58, wherein the gene is selected from the list consisting of: BMP4, E2F7, ESRRG, LYL1, STAT5A, THAP10, ZNF362, ZSCAN1, ANHX, CPEB1, CSRNP1, EN2, EPAS1, IRX3, LHX8, NR5A2, PRDM16, RAX2, SCML4, SMAD1, SOX6, SUV39H1, TFDP1, ZNF287, ZNF438, ZNF681, ZNF853, BMP4, CARF, ESRRG, ESRRG, FOXR2, HOXA7, IRF9, KAT5, KLF5, NEUROD1, PAX6, PIN1, PURG, RARA, SNAPC5, STAT5A, TBX22, WT1, ZNF138, ZNF143, ZNF205, ZNF235, ZNF526, ZNF548, ZNF559, ZNF611, ZNF655, ZNF672, ZNF699, ZNF706, ZNF714, ZNF772, ZNF782, ZSCAN1, ZSCAN26, ADNP, AHRR, AKNA, ALX3, ALX4, AR, ARHGAP35, ARID3C, ARID5B, ASCL5, ATF6B, ATOH7, BARHL1, BARHL2, BATF, BBX, BHLHE40, BNC2, BRD4, BRD9, BSX, CCDC17, CDX1, CDX2, CDX4, CEBPB, CENPB, CLOCK, CREB3, CREB3L4, CSRNP3, CTCF, CUX1, CUX2, DACH2, DLX1, DLX4, DLX5, DLX6, DMRTB1, DNMT3B, DOTIL, DPF1, DR1, E2F2, E2F3, EBF3, EGR2, EHF, ELF5, ELMSAN1, EMX1, ETS2, ETV4, ETV4, ETV6, EZH1, FERD3L, FERD3L, FIZ1, FOS, FOSB, FOXA1, FOXA2, FOXA3, FOXC2, FOXD3, FOXE1, FOXJ3, FOXN2, FOXN4, FOXO1, FOXP3, FOXS1, GATA2, GATA3, GATAD2A, GCM2, GFI1, GLI2, GLYR1, GPBP1L1, GRHL1, GTF2B, GTF2I, HDAC2, HES2, HES7, HESX1, HEY1, HIF3A, HIVEP3, HLF, HLX, HMG20A, HMGA2, HMGN3, HMX2, HNF1A, HNF4G, HOXA1, HOXA11, HOXB1, HOXB2, HOXB3, HOXC12, HOXC9, HOXC9, HOXD9, HSF4, HSF5, IKZF1, IKZF2, IKZF3, IKZF4, IRF7, IRX3, ISL2, JRK, JRKL, KAT7, KDM1A, KDM2B, KDM5D, KLF14, KLF9, KMT2B, L3MBTL4, LEF1, LHX6, LHX9, LIN28A, LIN28A, LMX1A, MAF, MAFF, MBD3, MBD4, MBNL2, MED1, MED14, MED23, MED24, MEF2C, MEF2D, MEIS3, MESP1, MGA, MITF, MLX, MNX1, MYF5, MYOG, MYPOP, MYRFL, MYT1L, NCOR1, NEUROG1, NFAT5, NFATC2, NFATC3, NFE2L1, NFE2L3, NFIA, NFYB, NKX1-2, NKX2-3, NKX2-4, NKX2-5, NOTCH3, NOTO, NR1H2, NR1H4, NR112, NR2C2, NR2F1, OSR2, OTX1, OVOL1, PA2G4, PATZ1, PAX9, PAX9, PBX4, PGR, PITX1, PITX3, POU2F2, POU3F1, POU3F2, POU3F3, POU5F1, PRDM1, PRDM7, PRR12, PRRX1, RBCK1, RHOXF1, RUNX2, SALL3, SIM1, SIX1, SIX6, SKI, SKIL, SKOR1, SMAD2, SMAD5, SMYD3, SNAPC2, SOX1, SOX14, SOX30, SOX5, SOX6, SP2, SP3, SP5, SP8, SP9, SPIB, STAT5B, T, TBPL1, TBX5, TBX6, TCF12, TCF23, TCF3, TFAP2A, TFAP2E, TFDP2, TFDP3, TGIF2, TGIF2LX, THAP6, THRA, TIGD1, TIGD3, TIGD5, TLX3, TOX, TOX2, TRIM27, TRIM27, TRIM40, TRIM52, TSHZ2, VAX1, VEGFA, VSX1, WNT1, WNT3A, YBX1, YY1, YY2, ZBED5, ZBTB2, ZBTB21, ZBTB38, ZBTB4, ZBTB40, ZBTB42, ZBTB49, ZBTB7B, ZBTB7C, ZBTB8B, ZBTB9, ZC3H8, ZEB2, ZFHX2, ZFHX3, ZFP28, ZFP41, ZFP69B, ZFP90, ZGLP1, ZHX3, ZIC5, ZKSCAN1, ZKSCAN2, ZKSCAN7, ZNF107, ZNF121, ZNF132, ZNF135, ZNF140, ZNF141, ZNF222, ZNF225, ZNF229, ZNF230, ZNF248, ZNF25, ZNF26, ZNF267, ZNF280C, ZNF281, ZNF283, ZNF286B, ZNF304, ZNF317, ZNF318, ZNF320, ZNF33B, ZNF346, ZNF358, ZNF367, ZNF382, ZNF383, ZNF385B, ZNF391, ZNF415, ZNF423, ZNF43, ZNF432, ZNF433, ZNF436, ZNF441, ZNF443, ZNF461, ZNF462, ZNF468, ZNF473, ZNF483, ZNF486, ZNF491, ZNF507, ZNF514, ZNF519, ZNF540, ZNF543, ZNF546, ZNF549, ZNF555, ZNF562, ZNF567, ZNF569, ZNF574, ZNF577, ZNF596, ZNF610, ZNF616, ZNF621, ZNF626, ZNF627, ZNF629, ZNF630, ZNF630, ZNF641, ZNF645, ZNF658, ZNF660, ZNF662, ZNF677, ZNF682, ZNF697, ZNF703, ZNF705A, ZNF705B, ZNF705G, ZNF716, ZNF729, ZNF750, ZNF75A, ZNF765, ZNF771, ZNF773, ZNF774, ZNF778, ZNF784, ZNF789, ZNF804B, ZNF816, ZNF823, ZNF83, ZNF831, ZNF846, ZNF852, ZNF879, ZNF91, ZNF93, ZNF99, ZNF99, ZSCAN16, ZSCAN2, ZSCAN21, ZSCAN5A, and ZSCAN5B.

[0494] 61. A guide RNA (gRNA) that binds a target site in a gene or regulatory DNA element thereof in a T cell, wherein reduced transcription of the gene, when targeted by an epigenetic-modifying DNA-targeting system comprising the gRNA, promotes a stem cell-like memory T cell phenotype, and wherein the gene is selected from the list consisting of: BMP4, E2F7, ESRRG, LYL1, STAT5A, THAP10, ZNF362, ZSCAN1, ANHX, CPEB1, CSRNP1, EN2, EPAS1, IRX3, LHX8, NR5A2, PRDM16, RAX2, SCML4, SMAD1, SOX6, SUV39H1, TFDP1, ZNF287, ZNF438, ZNF681, ZNF853, BMP4, CARF, ESRRG, ESRRG, FOXR2, HOXA7, IRF9, KAT5, KLF5, NEUROD1, PAX6, PIN1, PURG, RARA, SNAPC5, STAT5A, TBX22, WT1, ZNF138, ZNF143, ZNF205, ZNF235, ZNF526, ZNF548, ZNF559, ZNF611, ZNF655, ZNF672, ZNF699, ZNF706, ZNF714, ZNF772, ZNF782, ZSCAN1, ZSCAN26, ADNP, AHRR, AKNA, ALX3, ALX4, AR, ARHGAP35, ARID3C, ARID5B, ASCL5, ATF6B, ATOH7, BARHL1, BARHL2, BATF, BBX, BHLHE40, BNC2, BRD4, BRD9, BSX, CCDC17, CDX1, CDX2, CDX4, CEBPB, CENPB, CLOCK, CREB3, CREB3L4, CSRNP3, CTCF, CUX1, CUX2, DACH2, DLX1, DLX4, DLX5, DLX6, DMRTB1, DNMT3B, DOTIL, DPF1, DR1, E2F2, E2F3, EBF3, EGR2, EHF, ELF5, ELMSAN1, EMX1, ETS2, ETV4, ETV4, ETV6, EZH1, FERD3L, FERD3L, FIZ1, FOS, FOSB, FOXA1, FOXA2, FOXA3, FOXC2, FOXD3, FOXE1, FOXJ3, FOXN2, FOXN4, FOXO1, FOXP3, FOXS1, GATA2, GATA3, GATAD2A, GCM2, GFI1, GLI2, GLYR1, GPBP1L1, GRHL1, GTF2B, GTF2I, HDAC2, HES2, HES7, HESX1, HEY1, HIF3A, HIVEP3, HLF, HLX, HMG20A, HMGA2, HMGN3, HMX2, HNF1A, HNF4G, HOXA1, HOXA11, HOXB1, HOXB2, HOXB3, HOXC12, HOXC9, HOXC9, HOXD9, HSF4, HSF5, IKZF1, IKZF2, IKZF3, IKZF4, IRF7, IRX3, ISL2, JRK, JRKL, KAT7, KDM1A, KDM2B, KDM5D, KLF14, KLF9, KMT2B, L3MBTL4, LEF1, LHX6, LHX9, LIN28A, LIN28A, LMX1A, MAF, MAFF, MBD3, MBD4, MBNL2, MED1, MED14, MED23, MED24, MEF2C, MEF2D, MEIS3, MESP1, MGA, MITF, MLX, MNX1, MYF5, MYOG, MYPOP, MYRFL, MYT1L, NCOR1, NEUROG1, NFAT5, NFATC2, NFATC3, NFE2L1, NFE2L3, NFIA, NFYB, NKX1-2, NKX2-3, NKX2-4, NKX2-5, NOTCH3, NOTO, NR1H2, NR1H4, NR112, NR2C2, NR2F1, OSR2, OTX1, OVOL1, PA2G4, PATZ1, PAX9, PAX9, PBX4, PGR, PITX1, PITX3, POU2F2, POU3F1, POU3F2, POU3F3, POU5F1, PRDM1, PRDM7, PRR12, PRRX1, RBCK1, RHOXF1, RUNX2, SALL3, SIM1, SIX1, SIX6, SKI, SKIL, SKOR1, SMAD2, SMAD5, SMYD3, SNAPC2, SOX1, SOX14, SOX30, SOX5, SOX6, SP2, SP3, SP5, SP8, SP9, SPIB, STAT5B, T, TBPL1, TBX5, TBX6, TCF12, TCF23, TCF3, TFAP2A, TFAP2E, TFDP2, TFDP3, TGIF2, TGIF2LX, THAP6, THRA, TIGD1, TIGD3, TIGD5, TLX3, TOX, TOX2, TRIM27, TRIM27, TRIM40, TRIM52, TSHZ2, VAX1, VEGFA, VSX1, WNT1, WNT3A, YBX1, YY1, YY2, ZBED5, ZBTB2, ZBTB21, ZBTB38, ZBTB4, ZBTB40, ZBTB42, ZBTB49, ZBTB7B, ZBTB7C, ZBTB8B, ZBTB9, ZC3H8, ZEB2, ZFHX2, ZFHX3, ZFP28, ZFP41, ZFP69B, ZFP90, ZGLP1, ZHX3, ZIC5, ZKSCAN1, ZKSCAN2, ZKSCAN7, ZNF107, ZNF121, ZNF132, ZNF135, ZNF140, ZNF141, ZNF222, ZNF225, ZNF229, ZNF230, ZNF248, ZNF25, ZNF26, ZNF267, ZNF280C, ZNF281, ZNF283, ZNF286B, ZNF304, ZNF317, ZNF318, ZNF320, ZNF33B, ZNF346, ZNF358, ZNF367, ZNF382, ZNF383, ZNF385B, ZNF391, ZNF415, ZNF423, ZNF43, ZNF432, ZNF433, ZNF436, ZNF441, ZNF443, ZNF461, ZNF462, ZNF468, ZNF473, ZNF483, ZNF486, ZNF491, ZNF507, ZNF514, ZNF519, ZNF540, ZNF543, ZNF546, ZNF549, ZNF555, ZNF562, ZNF567, ZNF569, ZNF574, ZNF577, ZNF596, ZNF610, ZNF616, ZNF621, ZNF626, ZNF627, ZNF629, ZNF630, ZNF630, ZNF641, ZNF645, ZNF658, ZNF660, ZNF662, ZNF677, ZNF682, ZNF697, ZNF703, ZNF705A, ZNF705B, ZNF705G, ZNF716, ZNF729, ZNF750, ZNF75A, ZNF765, ZNF771, ZNF773, ZNF774, ZNF778, ZNF784, ZNF789, ZNF804B, ZNF816, ZNF823, ZNF83, ZNF831, ZNF846, ZNF852, ZNF879, ZNF91, ZNF93, ZNF99, ZNF99, ZSCAN16, ZSCAN2, ZSCAN21, ZSCAN5A, and ZSCAN5B.

[0495] 62. The gRNA of any of embodiments 55-61, wherein the target site is in a regulatory DNA element and the regulatory DNA element is an enhancer or a promoter.

[0496] 63. The gRNA of any of embodiments 55-62, wherein the target site comprises the sequence set forth in any one of SEQ ID NOS: 1-484, a contiguous portion thereof of at least 14 nucleotides (nt), or a complementary sequence of any of the foregoing.

[0497] 64. The gRNA of any of embodiments 53-60, wherein the gRNA comprises a gRNA spacer sequence comprising the sequence set forth in SEQ ID NO: 485-968, or a contiguous portion thereof of at least 14 nt.

[0498] 65. The gRNA of embodiment 64, wherein the gRNA further comprises the sequence set forth in SEQ ID NO: 1454.

[0499] 66. The gRNA of any of embodiments 55-65, wherein the gRNA comprises a gRNA that comprises the sequence set forth in any one of SEQ ID NOS: 969-1452, optionally wherein the at least one gRNA is the gRNA set forth in any one of SEQ ID NOS: 969-1452.

[0500] 67. The gRNA of embodiment 60 or embodiment 61, wherein the gene is selected from the list consisting of: BMP4, E2F7, ESRRG, LYL1, STAT5A, THAP10, ZNF362, ZSCAN1, ANHX, CPEB1, CSRNP1, EN2, EPAS1, IRX3, LHX8, NR5A2, PRDM16, RAX2, SCML4, SMAD1, SOX6, SUV39H1, TFDP1, ZNF287, ZNF438, ZNF681, and ZNF853.

[0501] 68. The gRNA of embodiment 60, embodiment 61 or embodiment 67, wherein the target site comprises the sequence set forth in any one of SEQ ID NOS: 1-27, a contiguous portion thereof of at least 14 nucleotides (nt), or a complementary sequence of any of the foregoing.

[0502] 69. The gRNA of embodiment 60, 61, 67 and 68, wherein the gRNA comprises a gRNA spacer sequence comprising the sequence set forth in SEQ ID NO: 485-511, or a contiguous portion thereof of at least 14 nt.

[0503] 70. The gRNA of embodiment 69, wherein the at least one gRNA further comprises the sequence set forth in SEQ ID NO: 1454.

[0504] 71. The gRNA of embodiment 60, embodiment 61 or any of embodiments 67-70, wherein the gRNA comprises a gRNA that comprises the sequence set forth in any one of SEQ ID NOS: 969-995, optionally wherein the at least one gRNA is the gRNA set forth in any one of SEQ ID NOS: 969-995.

[0505] 72. The gRNA of embodiment 60 or embodiment 61, wherein the gene is selected from the list consisting of: BMP4, E2F7, ESRRG, LYL1, STAT5A, THAP10, ZNF362, and ZSCAN1.

[0506] 73. The gRNA of embodiment 60, embodiment 61 or embodiment 72, wherein the target site comprises the sequence set forth in any one of SEQ ID NOS: 1-8, a contiguous portion thereof of at least 14 nucleotides (nt), or a complementary sequence of any of the foregoing.

[0507] 74. The gRNA of embodiment 60, 61, 72 or 73, wherein the gRNA comprises a gRNA spacer sequence comprising the sequence set forth in SEQ ID NO: 485-492, or a contiguous portion thereof of at least 14 nt.

[0508] 75. The gRNA of embodiment 74, wherein the gRNA further comprises the sequence set forth in SEQ ID NO: 1454.

[0509] 76. The gRNA of any of embodiments 60. 61 and 72-75, wherein the at least one gRNA comprises a gRNA that comprises the sequence set forth in any one of SEQ ID NOS: 969-976, optionally wherein the at least one gRNA is the gRNA set forth in any one of SEQ ID NOS: 969-976.

[0510] 77. The gRNA of any of embodiments 55-76, wherein the gRNA spacer sequence is between 14 nt and 24 nt, or between 16 nt and 22 nt in length.

[0511] 78. The gRNA of any of embodiments 55-77, wherein the gRNA spacer sequence is 18 nt, 19 nt, 20 nt, 21 nt or 22 nt in length.

[0512] 79. The gRNA of any of embodiments 55-78, wherein the gRNA comprises modified nucleotides for increased stability.

[0513] 80. The gRNA of any of embodiments 55-79, wherein the gRNA is capable of complexing with a Cas protein or variant thereof.

[0514] 81. The gRNA of any of embodiments 55-80, wherein the gRNA is capable of hybridizing to the target site or is complementary to the target site.

[0515] 82. A CRISPR Cas-guide RNA (gRNA) combination comprising:
[0516] (a) a Clustered Regularly Interspaced Short Palindromic Repeats associated (Cas) protein or variant thereof; and
[0517] (b) at least one gRNA of any of embodiments 53-78 that targets the Cas protein or variant thereof to a target site in a gene or regulatory DNA element thereof of a T cell.

[0518] 83. The CRISPR Cas-gRNA combination of embodiment 82, wherein the Cas protein or a variant thereof is a Cas9 protein or a variant thereof.

[0519] 84. The CRISPR Cas-gRNA combination of embodiment 82 or embodiment 83, wherein the Cas protein or a variant thereof is a variant Cas protein, wherein the variant Cas protein lacks nuclease activity or is a deactivated Cas (dCas) protein.

[0520] 85. The CRISPR Cas-gRNA combination of embodiment 83 or embodiment 84, wherein the variant Cas protein is a variant Cas9 protein that lacks nuclease activity or that is a deactivated Cas9 (dCas9) protein.

[0521] 86. The CRISPR Cas-gRNA combination of embodiment 83, wherein the Cas9 protein or a variant thereof is a Staphylococcus aureus Cas9 (SaCas9) protein or a variant thereof.

[0522] 87. The CRISPR Cas-gRNA combination of embodiment 83 or embodiment 84, wherein the variant Cas9 is a Staphylococcus aureus dCas9 protein (dSaCas9) that comprises at least one amino acid mutation selected from D10A and N580A, with reference to numbering of positions of SEQ ID NO: 1461.

[0523] 88. The CRISPR Cas-gRNA combination of embodiment 83, 84 or 87, wherein the variant Cas9 protein comprises the sequence set forth in SEQ ID NO: 1462, or an amino acid sequence that has at least 90%, 91%, 92%, 93%, 94%, 95%, 96%, 97%, 98%, or 99% sequence identity thereto.

[0524] 89. The CRISPR Cas-gRNA combination of embodiment 83, wherein the Cas9 protein or variant thereof is a Streptococcus pyogenes Cas9 (SpCas9) protein or a variant thereof.

[0525] 90. The CRISPR Cas-gRNA combination of any of embodiment 83 or embodiment 84, wherein the variant Cas9 is a Streptococcus pyogenes dCas9 (dSpCas9) protein that comprises at least one amino acid mutation selected from D10A and H840A, with reference to numbering of positions of SEQ ID NO: 1463.

[0526] 91. The CRISPR Cas-gRNA combination of embodiment 83, embodiment 84 or embodiment 90, wherein the variant Cas9 protein comprises the sequence set forth in SEQ ID NO: 1464, or an amino acid sequence that has at least 90%, 91%, 92%, 93%, 94%, 95%, 96%, 97%, 98%, or 99% sequence identity thereto.

[0527] 92. A polynucleotide encoding the DNA-targeting system of any of embodiments 1-54 or the fusion protein of the DNA-targeting system of any of embodiments 1-54, the gRNA of any of embodiments 55-81, the CRISPR Cas-gRNA combination of any of embodiments 82-91, or a portion or a component of any of the foregoing.

[0528] 93. A plurality of polynucleotides encoding the DNA-targeting system of any of embodiments 1-56 or the fusion protein of the DNA-targeting system of any of embodiments 1-56, the gRNA of any of embodiments 57-75, the CRISPR Cas-gRNA combination of any of embodiments 82-91, or a portion or a component of any of the foregoing 94. A vector comprising the polynucleotide of embodiment 92.

[0529] 95. A vector comprising the plurality of polynucleotides of embodiment 93.

[0530] 96. The vector of embodiment 94 or embodiment 95, wherein the vector is a viral vector.

[0531] 97. The vector of embodiment 96, wherein the vector is an adeno-associated virus (AAV) vector.

[0532] 98. The vector of embodiment 97, wherein the vector is selected from among AAV1,

[0533] AAV2, AAV3, AAV4, AAV5, AAV6, AAV7, AAV8, or AAV9.

[0534] 99. The vector of embodiment 96, wherein the vector is a lentiviral vector.

[0535] 100. The vector of embodiment 94 or embodiment 95, wherein the vector is a non-viral vector.

[0536] 101. The vector of embodiment 100, wherein the non-viral vector is selected from: a lipid nanoparticle, a liposome, an exosome, or a cell penetrating peptide.

[0537] 102. The vector of any of embodiments 94-101, wherein the vector exhibits immune cell or T-cell tropism.

[0538] 103. The vector of any of embodiments-94-102, wherein the vector comprises one vector, or two or more vectors.

[0539] 104. A modified T cell comprising the DNA-targeting system of any one of embodiments 1-56, the gRNA of any of embodiments 57-91, the CRISPR Cas-gRNA combination of any of embodiments 82-91, the polynucleotide of embodiment 92, the plurality of polynucleotides of embodiment 93, the vector of any of embodiments 94-103, or a portion or a component of any of the foregoing.

[0540] 105. A modified T cell comprising an epigenetic or phenotypic modification resulting from being contacted by the DNA-targeting system of any of embodiments 1-54, the gRNA of any of embodiments 55-81, the CRISPR Cas-gRNA combination of any of embodiments 82-91, the polynucleotide of embodiment 92, the plurality of polynucleotides of embodiment 93, the vector of any of embodiments 94-103, or a portion or a component of any of the foregoing.

[0541] 106. The modified T cell of embodiment 104 or embodiment 105, wherein the modified T cell exhibits reduced transcription of one or more genes whose transcriptional repression promotes a stem cell-like memory T-cell phenotype, in comparison to a comparable unmodified T cell.

[0542] 107. The modified T cell of embodiment 106, wherein the one or more genes are selected from the list consisting of: BMP4, E2F7, ESRRG, LYL1, STAT5A, THAP10, ZNF362, ZSCAN1, ANHX, CPEB1, CSRNP1, EN2, EPAS1, IRX3, LHX8, NR5A2, PRDM16, RAX2, SCML4, SMAD1, SOX6, SUV39H1, TFDP1, ZNF287, ZNF438, ZNF681, ZNF853, BMP4, CARF, ESRRG, ESRRG, FOXR2, HOXA7, IRF9, KAT5, KLF5, NEUROD1, PAX6, PIN1, PURG, RARA, SNAPC5, STAT5A, TBX22, WT1, ZNF138, ZNF143, ZNF205, ZNF235, ZNF526, ZNF548, ZNF559, ZNF611, ZNF655, ZNF672, ZNF699, ZNF706, ZNF714, ZNF772, ZNF782, ZSCAN1, ZSCAN26, ADNP, AHRR, AKNA, ALX3, ALX4, AR, ARHGAP35, ARID3C, ARID5B, ASCL5, ATF6B, ATOH7, BARHL1, BARHL2, BATF, BBX, BHLHE40, BNC2, BRD4, BRD9, BSX, CCDC17, CDX1, CDX2, CDX4, CEBPB, CENPB, CLOCK, CREB3, CREB3L4, CSRNP3, CTCF, CUX1, CUX2, DACH2, DLX1, DLX4, DLX5, DLX6, DMRTB1, DNMT3B, DOTIL, DPF1, DR1, E2F2, E2F3, EBF3, EGR2, EHF, ELF5, ELMSAN1, EMX1, ETS2, ETV4, ETV4, ETV6, EZH1, FERD3L, FERD3L, FIZ1, FOS, FOSB, FOXA1, FOXA2, FOXA3, FOXC2, FOXD3, FOXE1, FOXJ3, FOXN2, FOXN4, FOXO1, FOXP3, FOXS1, GATA2, GATA3, GATAD2A, GCM2, GFI1, GLI2, GLYR1, GPBP1L1, GRHL1, GTF2B, GTF2I, HDAC2, HES2, HES7, HESX1, HEY1, HIF3A, HIVEP3, HLF, HLX, HMG20A, HMGA2, HMGN3, HMX2, HNF1A, HNF4G, HOXA1, HOXA11, HOXB1, HOXB2, HOXB3, HOXC12, HOXC9, HOXC9, HOXD9, HSF4, HSF5, IKZF1, IKZF2, IKZF3, IKZF4, IRF7, IRX3, ISL2, JRK, JRKL, KAT7, KDM1A, KDM2B, KDM5D, KLF14, KLF9, KMT2B, L3MBTL4, LEF1, LHX6, LHX9, LIN28A, LIN28A, LMX1A, MAF, MAFF, MBD3, MBD4, MBNL2, MED1, MED14, MED23, MED24, MEF2C, MEF2D, MEIS3, MESP1, MGA, MITF, MLX, MNX1, MYF5, MYOG, MYPOP, MYRFL, MYT1L, NCOR1, NEUROG1, NFAT5, NFATC2, NFATC3, NFE2L1, NFE2L3, NFIA, NFYB, NKX1-2, NKX2-3, NKX2-4, NKX2-5, NOTCH3, NOTO, NR1H2, NR1H4, NR112, NR2C2, NR2F1, OSR2, OTX1, OVOL1, PA2G4, PATZ1, PAX9, PAX9, PBX4, PGR, PITX1, PITX3, POU2F2, POU3F1, POU3F2, POU3F3, POU5F1, PRDM1, PRDM7, PRR12, PRRX1, RBCK1, RHOXF1, RUNX2, SALL3, SIM1, SIX1, SIX6, SKI, SKIL, SKOR1, SMAD2, SMAD5, SMYD3, SNAPC2, SOX1, SOX14, SOX30, SOX5, SOX6, SP2, SP3, SP5, SP8, SP9, SPIB, STAT5B, T, TBPL1, TBX5, TBX6, TCF12, TCF23, TCF3, TFAP2A, TFAP2E, TFDP2, TFDP3, TGIF2, TGIF2LX, THAP6, THRA, TIGD1, TIGD3, TIGD5, TLX3, TOX, TOX2, TRIM27, TRIM27, TRIM40, TRIM52, TSHZ2, VAX1, VEGFA, VSX1, WNT1, WNT3A, YBX1, YY1, YY2, ZBED5, ZBTB2, ZBTB21, ZBTB38, ZBTB4, ZBTB40, ZBTB42, ZBTB49, ZBTB7B, ZBTB7C, ZBTB8B, ZBTB9, ZC3H8, ZEB2, ZFHX2, ZFHX3, ZFP28, ZFP41, ZFP69B, ZFP90, ZGLP1, ZHX3, ZIC5, ZKSCAN1, ZKSCAN2, ZKSCAN7, ZNF107, ZNF121, ZNF132, ZNF135, ZNF140, ZNF141, ZNF222, ZNF225, ZNF229, ZNF230, ZNF248, ZNF25, ZNF26, ZNF267, ZNF280C, ZNF281, ZNF283, ZNF286B, ZNF304, ZNF317, ZNF318, ZNF320, ZNF33B, ZNF346, ZNF358, ZNF367, ZNF382, ZNF383, ZNF385B, ZNF391, ZNF415, ZNF423, ZNF43, ZNF432, ZNF433, ZNF436, ZNF441, ZNF443, ZNF461, ZNF462, ZNF468, ZNF473, ZNF483, ZNF486, ZNF491, ZNF507, ZNF514, ZNF519, ZNF540, ZNF543, ZNF546, ZNF549, ZNF555, ZNF562, ZNF567, ZNF569, ZNF574, ZNF577, ZNF596, ZNF610, ZNF616, ZNF621, ZNF626, ZNF627, ZNF629, ZNF630, ZNF630, ZNF641, ZNF645, ZNF658, ZNF660, ZNF662, ZNF677, ZNF682, ZNF697, ZNF703, ZNF705A, ZNF705B, ZNF705G, ZNF716, ZNF729, ZNF750, ZNF75A, ZNF765, ZNF771, ZNF773, ZNF774, ZNF778, ZNF784, ZNF789, ZNF804B, ZNF816, ZNF823, ZNF83, ZNF831, ZNF846, ZNF852, ZNF879, ZNF91, ZNF93, ZNF99, ZNF99, ZSCAN16, ZSCAN2, ZSCAN21, ZSCAN5A, and ZSCAN5B.

[0543] 108. The modified T cell of embodiment 106, wherein the one or more genes are selected from the list consisting of: BMP4, E2F7, ESRRG, LYL1, STAT5A, THAP10, ZNF362, ZSCAN1, ANHX, CPEB1, CSRNP1, EN2, EPAS1, IRX3, LHX8, NR5A2, PRDM16, RAX2, SCML4, SMAD1, SOX6, SUV39H1, TFDP1, ZNF287, ZNF438, ZNF681, and ZNF853.

[0544] 109. The modified T cell of embodiment 106, wherein the one or more genes are selected from the list consisting of: BMP4, E2F7, ESRRG, LYL1, STAT5A, THAP10, ZNF362, and ZSCAN1.

[0545] 110. The modified T cell of any of embodiments 106-109, wherein the transciption is reduced by at least about 1.2-fold, 1.25-fold, 1.3-fold, 1.4-fold, 1.5-fold, 1.6-fold, 1.7-fold, 1.75-fold, 1.8-fold, 1.9-fold, 2-fold, 2.5-fold, 3-fold, 4-fold, or 5-fold. 111. The modified T cell of any of embodiments 104-110, wherein the modified T cell exhibits a stem cell-like memory T-cell phenotype.

[0546] 112. The modified T cell of embodiment 111, wherein the stem cell-like memory T cell phenotype comprises expression of CCR7 and/or CD27.

[0547] 113. The modified T cell of embodiment 111, wherein the stem cell-like memory T cell phenotype comprises expression of CCR7 and CD27.

[0548] 114. The modified T cell of any of embodiments 111-113, wherein the stem cell-like memory T cell phenotype comprises one or more cell-surface markers selected from CCR7+, CD27+, CD45RA+, CD45RO−, CCR7+, CD62L+, CD28+, CD27+, IL-7Rα+, CXCR3+, CD95+, CD11a+, IL-2Rβ+, CD58+, and CD57−.

[0549] 115. The modified T cell of any of embodiments 104-114, wherein the modified T cell is capable of a stronger and/or more persistent immune response, in comparison to a comparable unmodified T cell.

[0550] 116. The modified T cell of any of embodiments 104-115, wherein the modified T cell is characterized by polyfunctional activity of the T cells to produce two or more cytokines following stimulation of T cells with a stimulatory agent, optionally wherein the two or more cytokines are selected from among interferon-gamma (IFN-gamma), interleukin 2 (IL-2) and TNF-alpha.

[0551] 117. The modified T cell of any of embodiments 104-116, wherein the modified T cell is derived from a cell from a subject.

[0552] 118. The modified T cell of any of embodiments 104-117, wherein the modified T cell is derived from a primary T cell.

[0553] 119. The modified T cell of any of embodiments 104-117, wherein the modified T cell is derived from a T cell progenitor, a pluripotent stem cell, or an induced pluripotent stem cell.

[0554] 120. The modified T cell of any of embodiments 104-119, wherein the modified T cell further comprises an engineered T cell receptor (eTCR) or chimeric antigen receptor (CAR).

[0555] 121. A method of reducing the transcription of one or more genes in a T cell, the method comprising introducing into a T cell the DNA-targeting system of any of embodiments 1-54, the gRNA of any of embodiments 55-81, the CRISPR Cas-gRNA combination of any of embodiments 82-91, the polynucleotide of embodiment 92, the plurality of polynucleotides of embodiment 93, the vector of any of embodiments 94-103, or a portion or a component of any of the foregoing.

[0556] 122. The method of embodiment 121, wherein the one or more genes is a gene epigenetically modified by the DNA-targeting system.

[0557] 123. The method of embodiment 121 or embodiment 122, wherein the transcription of the one or more genes is reduced in comparison to a comparable T cell not subjected to the method.

[0558] 124. The method of any of embodiments 121-123, wherein the transcription of the one or more genes is reduced by at least about 1.2-fold, 1.25-fold, 1.3-fold, 1.4-fold, 1.5-fold, 1.6-fold, 1.7-fold, 1.75-fold, 1.8-fold, 1.9-fold, 2-fold, 2.5-fold, 3-fold, 4-fold, or 5-fold. 125. The method of any of embodiments 121-124, wherein the reduced transcription of the one or more genes promotes a stem cell-like memory T cell phenotype in the T cell.

[0559] 126. A method of promoting a stem cell-like memory T cell phenotype in a T cell, the method comprising introducing into the T cell the DNA-targeting system of any one of embodiments 1-54, the gRNA of any of embodiments 55-81, the CRISPR Cas-gRNA combination of any of embodiments 82-91, the polynucleotide of embodiment 92, the plurality of polynucleotides of embodiment 93, the vector of any of embodiments 94-103, or a portion or a component of any of the foregoing.

[0560] 127. The method of embodiment 125 or embodiment 126, wherein the stem cell-like memory T cell phenotype comprises one or more cell-surface markers selected from CCR7+, CD27+, CD45RA+, CD45RO−, CCR7+, CD62L+, CD28+, CD27+, IL-7Rα+, CXCR3+, CD95+, CD11a+, IL-2Rβ+, CD58+, and CD57−.

[0561] 128. The method of any of embodiments 125-127, wherein the stem cell-like memory T cell phenotype comprises expression of CCR7 and/or CD27.

[0562] 129. The method of any of embodiments 125-128, wherein the stem cell-like memory T cell phenotype is characterized by polyfunctional activity of the T cell to produce two or more cytokines following stimulation of the T cell with a stimulatory agent, optionally wherein the two or more cytokines are selected from among interferon-gamma (IFN-gamma), interleukin 2 (IL-2), and TNF-alpha.

[0563] 130. The method of any of embodiments 121-129, wherein the T cell is a T cell in a subject and the method is carried out in vivo.

[0564] 131. The method of any of embodiments 121-129, wherein the T cell is a T cell from a subject, or derived from a cell from the subject, and the method is carried out ex vivo.

[0565] 132. The method of embodiment 131, wherein the T cell is a primary T cell.

[0566] 133. The method of embodiment 131, wherein the T cell is derived from a T cell progenitor, a pluripotent stem cell, or an induced pluripotent stem cell.

[0567] 134. A modified T cell produced by the method of any of embodiments 121-133.

[0568] 135. A method of cell therapy for treating a disease in a subject in need thereof, comprising administering to the subject a cellular composition that comprises the modified T cell of any of embodiments 104-120 and 134.

[0569] 136. The method of embodiment 135, wherein the modified T cell is obtained from or derived from a cell from said subject in need thereof.

[0570] 137. The method of embodiment 135, wherein the subject is a first subject, and the modified T cell is obtained from or derived from a cell from a second subject.

[0571] 138. The method of any of embodiments 135-137, wherein the subject in need thereof is a human.

[0572] 139. The method of any of embodiments 135-138, wherein the administered modified T cell exhibits a stronger and/or more persistent immune response in the subject, in comparison to a comparable unmodified T cell.

[0573] 140. The method of any of embodiments 135-139, wherein the subject has or is suspected of having a disease, condition, or disorder, optionally wherein the disease, condition, or disorder is cancer, viral infection, autoimmune disease, or graft-versus-host disease, or the subject has undergone or is expected to undergo organ transplantation.

[0574] 141. The method of any of embodiments 135-140, wherein the subject has or is suspected of having cancer.

[0575] 142. A pharmaceutical composition comprising the modified T cell of any of embodiments 104-120 and 134.

[0576] 143. A pharmaceutical composition comprising the DNA-targeting system of any of embodiments 1-54, the gRNA of any of embodiments 55-81, the CRISPR Cas-gRNA combination of any of embodiments 82-91, the polynucleotide of embodiment 92, the plurality of polynucleotides of embodiment 93, the vector of any of embodiments 94-103, or a portion or a component of any of the foregoing.

[0577] 144. The pharmaceutical composition of embodiment 142 or embodiment 143, for use in treating a disease, condition, or disorder in a subject. 145. The pharmaceutical composition of embodiment 142 or embodiment 143, for use in the manufacture of a medicament for treating a disease, condition, or disorder in a subject.

[0578] 146 The pharmaceutical composition of embodiments 144 or 145, wherein the subject has or is suspected of having a disease, condition, or disorder, optionally wherein the disease, condition, or disorder is cancer, viral infection, autoimmune disease, or graft-versus-host disease, or the subject has undergone or is expected to undergo organ transplantation.

[0579] 147. The pharmaceutical composition of embodiments 144-147, wherein the subject has or is suspected of having cancer.

[0580] 148. The pharmaceutical composition of any of embodiments 144-147, wherein the pharmaceutical composition is to be administered to the subject in vivo.

[0581] 149. The pharmaceutical composition of any of embodiments 144-147, wherein the subject is a first subject, and the pharmaceutical composition is to be administered ex vivo to T cells from the first subject, or to T cells from a second subject.

[0582] 150. The pharmaceutical composition of embodiment 149, wherein following administration to T cells from the first subject or second subject, the T cells are administered to the first subject.

[0583] 151. The pharmaceutical composition of any of embodiments 143-148, wherein following administration of the pharmaceutical composition, the expression of one or more genes is reduced in T cells of the subject.

[0584] 152. The pharmaceutical composition of embodiment 149 or embodiment 150, wherein following administration of the pharmaceutical composition to the T cells from the first or second subject, the expression of one or more genes is reduced in the T cells.

[0585] 153. The pharmaceutical composition of embodiment 151 or embodiment 152, wherein the one or more genes are selected from the list consisting of: BMP4, E2F7, ESRRG, LYL1, STAT5A, THAP10, ZNF362, ZSCAN1, ANHX, CPEB1, CSRNP1, EN2, EPAS1, IRX3, LHX8, NR5A2, PRDM16, RAX2, SCML4, SMAD1, SOX6, SUV39H1, TFDP1, ZNF287, ZNF438, ZNF681, ZNF853, BMP4, CARF, ESRRG, ESRRG, FOXR2, HOXA7, IRF9, KAT5, KLF5, NEUROD1, PAX6, PIN1, PURG, RARA, SNAPC5, STAT5A, TBX22, WT1, ZNF138, ZNF143, ZNF205, ZNF235, ZNF526, ZNF548, ZNF559, ZNF611, ZNF655, ZNF672, ZNF699, ZNF706, ZNF714, ZNF772, ZNF782, ZSCAN1, ZSCAN26, ADNP, AHRR, AKNA, ALX3, ALX4, AR, ARHGAP35, ARID3C, ARID5B, ASCL5, ATF6B, ATOH7, BARHL1, BARHL2, BATF, BBX, BHLHE40, BNC2, BRD4, BRD9, BSX, CCDC17, CDX1, CDX2, CDX4, CEBPB, CENPB, CLOCK, CREB3, CREB3L4, CSRNP3, CTCF, CUX1, CUX2, DACH2, DLX1, DLX4, DLX5, DLX6, DMRTB1, DNMT3B, DOTIL, DPF1, DR1, E2F2, E2F3, EBF3, EGR2, EHF, ELF5, ELMSAN1, EMX1, ETS2, ETV4, ETV4, ETV6, EZH1, FERD3L, FERD3L, FIZ1, FOS, FOSB, FOXA1, FOXA2, FOXA3, FOXC2, FOXD3, FOXE1, FOXJ3, FOXN2, FOXN4, FOXO1, FOXP3, FOXS1, GATA2, GATA3, GATAD2A, GCM2, GFI1, GLI2, GLYR1, GPBP1L1, GRHL1, GTF2B, GTF2I, HDAC2, HES2, HES7, HESX1, HEY1, HIF3A, HIVEP3, HLF, HLX, HMG20A, HMGA2, HMGN3, HMX2, HNF1A, HNF4G, HOXA1, HOXA11, HOXB1, HOXB2, HOXB3, HOXC12, HOXC9, HOXC9, HOXD9, HSF4, HSF5, IKZF1, IKZF2, IKZF3, IKZF4, IRF7, IRX3, ISL2, JRK, JRKL, KAT7, KDM1A, KDM2B, KDM5D, KLF14, KLF9, KMT2B, L3MBTL4, LEF1, LHX6, LHX9, LIN28A, LIN28A, LMX1A, MAF, MAFF, MBD3, MBD4, MBNL2, MED1, MED14, MED23, MED24, MEF2C, MEF2D, MEIS3, MESP1, MGA, MITF, MLX, MNX1, MYF5, MYOG, MYPOP, MYRFL, MYT1L, NCOR1, NEUROG1, NFAT5, NFATC2, NFATC3, NFE2L1, NFE2L3, NFIA, NFYB, NKX1-2, NKX2-3, NKX2-4, NKX2-5, NOTCH3, NOTO, NR1H2, NR1H4, NR112, NR2C2, NR2F1, OSR2, OTX1, OVOL1, PA2G4, PATZ1, PAX9, PAX9, PBX4, PGR, PITX1, PITX3, POU2F2, POU3F1, POU3F2, POU3F3, POU5F1, PRDM1, PRDM7, PRR12, PRRX1, RBCK1, RHOXF1, RUNX2, SALL3, SIM1, SIX1, SIX6, SKI, SKIL, SKOR1, SMAD2, SMAD5, SMYD3, SNAPC2, SOX1, SOX14, SOX30, SOX5, SOX6, SP2, SP3, SP5, SP8, SP9, SPIB, STAT5B, T, TBPL1, TBX5, TBX6, TCF12, TCF23, TCF3, TFAP2A, TFAP2E, TFDP2, TFDP3, TGIF2, TGIF2LX, THAP6, THRA, TIGD1, TIGD3, TIGD5, TLX3, TOX, TOX2, TRIM27, TRIM27, TRIM40, TRIM52, TSHZ2, VAX1, VEGFA, VSX1, WNT1, WNT3A, YBX1, YY1, YY2, ZBED5, ZBTB2, ZBTB21, ZBTB38, ZBTB4, ZBTB40, ZBTB42, ZBTB49, ZBTB7B, ZBTB7C, ZBTB8B, ZBTB9, ZC3H8, ZEB2, ZFHX2, ZFHX3, ZFP28, ZFP41, ZFP69B, ZFP90, ZGLP1, ZHX3, ZIC5, ZKSCAN1, ZKSCAN2, ZKSCAN7, ZNF107, ZNF121, ZNF132, ZNF135, ZNF140, ZNF141, ZNF222, ZNF225, ZNF229, ZNF230, ZNF248, ZNF25, ZNF26, ZNF267, ZNF280C, ZNF281, ZNF283, ZNF286B, ZNF304, ZNF317, ZNF318, ZNF320, ZNF33B, ZNF346, ZNF358, ZNF367, ZNF382, ZNF383, ZNF385B, ZNF391, ZNF415, ZNF423, ZNF43, ZNF432, ZNF433, ZNF436, ZNF441, ZNF443, ZNF461, ZNF462, ZNF468, ZNF473, ZNF483, ZNF486, ZNF491, ZNF507, ZNF514, ZNF519, ZNF540, ZNF543, ZNF546, ZNF549, ZNF555, ZNF562, ZNF567, ZNF569, ZNF574, ZNF577, ZNF596, ZNF610, ZNF616, ZNF621, ZNF626, ZNF627, ZNF629, ZNF630, ZNF630, ZNF641, ZNF645, ZNF658, ZNF660, ZNF662, ZNF677, ZNF682, ZNF697, ZNF703, ZNF705A, ZNF705B, ZNF705G, ZNF716, ZNF729, ZNF750, ZNF75A, ZNF765, ZNF771, ZNF773, ZNF774, ZNF778, ZNF784, ZNF789, ZNF804B, ZNF816, ZNF823, ZNF83, ZNF831, ZNF846, ZNF852, ZNF879, ZNF91, ZNF93, ZNF99, ZNF99, ZSCAN16, ZSCAN2, ZSCAN21, ZSCAN5A, and ZSCAN5B.

[0586] 154. The pharmaceutical composition of embodiment 151 or embodiment 152, wherein the one or more genes are selected from the list consisting of: BMP4, E2F7, ESRRG, LYL1, STAT5A, THAP10, ZNF362, ZSCAN1, ANHX, CPEB1, CSRNP1, EN2, EPAS1, IRX3, LHX8, NR5A2, PRDM16, RAX2, SCML4, SMAD1, SOX6, SUV39H1, TFDP1, ZNF287, ZNF438, ZNF681, and ZNF853.

[0587] 155. The pharmaceutical composition of embodiment 151 or embodiment 152, wherein the one or more genes are selected from the list consisting of: BMP4, E2F7, ESRRG, LYL1, STAT5A, THAP10, ZNF362, and ZSCAN1.

[0588] 156. A method for treating a disease in a subject in need thereof, comprising administering to the subject the DNA-targeting system of any of embodiments 1-54, the gRNA of any of embodiments 55-81, the CRISPR Cas-gRNA combination of any of embodiments 82-91, the polynucleotide of embodiment 92, the plurality of polynucleotides of embodiment 93, the vector of any of embodiments 94-103, the modified T cell of any of embodiments 104-120 and 134, the pharmaceutical composition of any of embodiments 142-155, or a portion or a component of any of the foregoing.

### IX. EXAMPLES

[0589] The following examples are included for illustrative purposes only and are not intended to limit the scope of the invention.

### Example 1: A Screen for gRNAs Targeting Genes Affecting T Cell Phenotype

[0590] A library of gRNAs targeting DNA-targeting genes was screened in a pooled format in primary human T-cells expressing an exemplary dCas9-transcriptional repressor fusion protein, to identify gRNAs that facilitate enrichment of stem cell-like memory T (T_{SCM}) cell-like phenotypes.

A. Screen of gRNA Library for gRNAs that Promote T_{SCM} Cell-Like Phenotype Via CRISPR-Based Transcriptional Interference (CRISPRi)

[0591] A library of 9,715 gRNAs was generated. The library consisted of 9,465 gRNAs targeted to 1,702 human genes, and 250 control gRNAs with spacers not aligned to the human genome. gRNAs were designed according to the protospacer adjacent motif (PAM) sequence for SpCas9 (5′-NGG-3′).

[0592] The library was screened in a CRISPR-interference (CRISPRi) screen to identify gRNAs that facilitate enrichment of a CCR7+/CD27+T_{SCM} cell-like phenotype in primary T cells expressing dSpCas9-KRAB (SEQ ID NO: 1458), an exemplary DNA-targeting fusion protein for transcriptional repression of gRNA-targeted genes, as described below.

[0593] Primary human CD4+ and CD8+ T cells were isolated from a leukapheresis pack (Stemcell technologies) obtained from a human subject, using EasySep human CD4+ T cell isolation kit (Stemcell technologies Cat #17952) and EasySep CD8+ T cell isolation kit (Stemcell technologies Cat #17953), respectively. Isolated cells were aliquoted and cryopreserved.

[0594] On day 0, CD4+ and CD8+ T cells were thawed and pooled at a 1:1 ratio. Then, cells were activated using CTS Dynabeads CD3/CD28 (ThermoFisher Scientific Cat #40203D) at a beads-to-cell ratio of 1:1, and cultured in CTS OpTmizer T Cell Expansion SFM (ThermoFisher Scientific Cat #A1048501) with human IL-7, IL-15, and IL-2.

[0595] On day 1, T cells were transduced with lentiviral constructs encoding dSpCas9-KRAB and the pooled gRNA library with 10 μg/ml of protamine sulfate in CTS OpTmizer T Cell Expansion SFM (ThermoFisher Scientific Cat #A1048501) with human IL-7, IL-15, and IL-2, without antibiotic selection. Each individual construct encoded the dSpCas9-KRAB and a single gRNA from the library.

[0596] On day 3, CD90+ cells were enriched using CD90.1 MicroBeads (Miltenyi Biotec Cat #: 130-094-523), and enrichment was confirmed by flow cytometry, as shown in FIG. 1B.

[0597] On day 8, unfixed cells were immunostained with anti-CCR7 and anti-CD27 antibodies and sorted by FACS into (a) a “double-positive” CCR7+/CD27+ TSCM cell-like population, (b) a “double negative” CCR7−/CD27− population, and (c) an unsorted population with all cells regardless of CCR7 and CD27 expression (FIG. 1C). Unsorted, double-positive, and double-negative populations were collected.

[0598] gRNAs that facilitate repression of genes whose transcriptional repression promotes a CCR7+/CD27+T_{SCM} cell-like phenotype were expected to be enriched in the CCR7+/CD27+ population in comparison to the unsorted population. To identify gRNAs enriched in the CCR7+/CD27+ population, sequencing was performed to compare the abundance of each gRNA between the CCR7+/CD27+ population and the unsorted population. Genomic DNA was isolated from the two populations. Targeted PCR was performed to amplify the gRNA spacers and append sequencing adapters. Each sample was barcoded separately. Samples were then sequenced using an Illumina NextSeq System. Three sequencing replicates of the CCR7+/CD27+ population were compared to three replicates of the unsorted population using DEseq2, a method for detecting differentially expressed transcripts.

B. Identification of gRNAs and Genes Promoting a CCR7+/CD27+T_{SCM} Cell-Like Phenotype

[0599] gRNAs enriched in the CCR7+/CD27+ population in comparison to the unsorted population were identified based on sequencing analysis (FIG. 2). A false discovery rate (FDR) cutoff of adjusted p-value <0.1 was used to define significantly enriched gRNAs. 484 gene-targeting gRNAs (Table E1; SEQ ID NOs: 1-484) were enriched in the CCR7+/CD27+ population.

[0600] These results support that genes targeted by the enriched gRNAs would be expected to promote the assessed T_{SCM} cell-like phenotype when repressed. The enriched gene-targeting gRNAs targeted 445 different genes. 31 of the 445 genes ANHX, BMP4, ELF5, ETV4, FERD3L, HNF4G, JRK, KMT2B, MESP1, NFATC2, NOTO, NR5A2, STAT5A, PRDM16, PURG, TFAP2A, VSX1, YY2, ZBED5, ZBTB7B, ZKSCAN1, ZNF135, ZNF317, ZNF385B, ZNF43, ZNF441, ZNF519, ZNF778, ZNF83, ZSCAN5A, and ZSCAN5B, were targeted by two separate gRNAs while 4 of the 445 genes ESRRG, HMGA2, PITX3, ZNF773, were targeted by three gRNAs identified in the screen.

TABLE E1
gRNAs enriched in CCR7+/CD27+ population in CRISPRi screen

| Target | | | |
|---|---|---|---|
| site SEQ | | | |
| ID NO | gRNA name | gRNA target site | Target gene |
| 1 | BMP4_a | GACAGCCGGCGAGCAGGGG | BMP4 |
| 2 | E2F7_a | TTAGCGGGGACTACGATCC | E2F7 |
| 3 | ESRRG_a | TGGAGCCCGCCGCCTCCAG | ESRRG |
| 4 | LYL1_a | GTTTCCTCCCTCTCACCCC | LYL1 |
| 5 | STAT5A_a | CCGCGGTCCAGGGATAGGT | STAT5A |
| 6 | THAP10_a | CTTCCGGTGACCAGAGGTA | THAP10 |
| 7 | ZNF362_a | GGGTAGGAAGTGTCTCCCG | ZNF362 |
| 8 | ZSCAN1_a | CCGCGCGCGGGCTTCGCTC | ZSCAN1 |
| 9 | ANHX_a | CGGAAGGTGAGGGGCGCTA | ANHX |
| 10 | CPEB1_a | CAACATCGTCTTCCATGTC | CPEB1 |
| 11 | CSRNP1_a | TCTGCGCGTCCGGCAGCGG | CSRNP1 |
| 12 | EN2_a | CTCCGTGTGCGCCGCGGGA | EN2 |
| 13 | EPAS1_a | CGCCCCAGCGCTCCTGAGG | EPAS1 |
| 14 | IRX3_a | AAGCAGCGGAAGCGATCCT | IRX3 |
| 15 | LHX8_a | CGAGCTACCAGCGCTCGGG | LHX8 |
| 16 | NR5A2_a | AGCATGACAAGGCGACCGC | NR5A2 |
| 17 | PRDM16_a | ACCATGCGATCCAAGGCGA | PRDM16 |
| 18 | RAX2_a | CCGGAGCCGAGCCAGGTCG | RAX2 |
| 19 | SCML4_a | TGTGAGCTACTAACACGGG | SCML4 |
| 20 | SMAD1_a | GCTCCTCCGAGCAGACGGG | SMAD1 |
| 21 | SOX6_a | TCTAGCCAGCCCCTAAGTC | SOX6 |
| 22 | SUV39H1_a | TCTTCTCGCGAGGCCGGCT | SUV39H1 |
| 23 | TFDP1_a | TCCCGGCGCCACTCGGCCC | TFDP1 |
| 24 | ZNF287_a | CAGAGGCGCCGGGGTTTCT | ZNF287 |
| 25 | ZNF438_a | GTCACGGGCCCAGCAGTCG | ZNF438 |
| 26 | ZNF681_a | AGGAGAAAGGACGCCCGGG | ZNF681 |
| 27 | ZNF853_a | CCTCTGCGCTAGGGAGGTG | ZNF853 |
| 28 | BMP4_b | GAGGAAGGAAGATGCGAGA | BMP4 |
| 29 | CARF_a | TCCCAACCAGAGGCTCACT | CARF |
| 30 | ESRRG_b | TCTTCAGCTATACCAAGAG | ESRRG |
| 31 | ESRRG_c | TGTGTTGTAGTGATCATGT | ESRRG |
| 32 | FOXR2_a | ATCTAGGGAGCTTATCAGT | FOXR2 |
| 33 | HOXA7_a | GCCGTAGCCGGACGCAAAG | HOXA7 |
| 34 | IRF9_a | GGTAAGATCAGCCAAGGAT | IRF9 |
| 35 | KAT5_a | GAAGTGACGTCTCCCAGAG | KAT5 |
| 36 | KLF5_a | AGAGCCTGAGAGCACGGTG | KLF5 |
| 37 | NEUROD1_a | CAGGACCTACTAACAACAA | NEUROD1 |
| 38 | PAX6_a | ATGTTGCGGAGTGATTAGT | PAX6 |
| 39 | PIN1_a | TGCGCTTCTCCCAGCCGGG | PIN1 |
| 40 | PURG_a | GGTGTCCGAAGTCAGGCGG | PURG |
| 41 | PURG_b | TGGTCGTGAAGGGCATCGG | PURG |
| 42 | RARA_a | CATAGCGAGTCACGTGCGG | RARA |
| 43 | SNAPC5_a | TGCCGGGCCGACAGCAGCC | SNAPC5 |
| 44 | STAT5A_b | CCTCATAAGTAACTAGGCT | STAT5A |
| 45 | TBX22_a | TTAGTGGGACATCAGTACA | TBX22 |
| 46 | WT1_a | CAAGGCAGCGCCCACACCC | WT1 |
| 47 | ZNF138_a | TGCGTCCTCTTACTCCTAG | ZNF138 |
| 48 | ZNF143_a | TGTCCTGGTGCATGGTGGT | ZNF143 |
| 49 | ZNF205_a | CTCCACAGCCTGCACGGGG | ZNF205 |
| 50 | ZNF235_a | AGAGGGCTCGGAGAAGTCT | ZNF235 |
| 51 | ZNF526_a | GATTGGTCGCCACGGGTAA | ZNF526 |
| 52 | ZNF548_a | AGCACTGGGAGGACCGGTC | ZNF548 |
| 53 | ZNF559_a | CTGTCCTCAGGGGTCGAGG | ZNF559 |
| 54 | ZNF611_a | TGCGCTAACTAGGTTCCCA | ZNF611 |
| 55 | ZNF655_a | CCGCGAGGTGAATGAACCA | ZNF655 |
| 56 | ZNF672_a | CACCGGTTGCTGGGAAGAC | ZNF672 |
| 57 | ZNF699_a | CGGACAAGGAGTGGCGGGG | ZNF699 |
| 58 | ZNF706_a | CACTCTGGCAGCTGACCGG | ZNF706 |
| 59 | ZNF714_a | CTGACCTGGAGTCCTCTCA | ZNF714 |
| 60 | ZNF772_a | TAGTCCACAGGCCTGATGG | ZNF772 |
| 61 | ZNF782_a | GGGTCGGCTCGGAAAGTAG | ZNF782 |
| 62 | ZSCAN1_a | TCGCCGTAGGGGAGGGAAG | ZSCAN1 |
| 63 | ZSCAN26_a | TCCTTCTGCGATGCCTAAG | ZSCAN26 |
| 64 | ADNP_a | TGTCTGCTGAGGGGAGACG | ADNP |
| 65 | AHRR_a | GCCAGGGCGCGCTGCCCCG | AHRR |
| 66 | AKNA_a | CCAGGAAACCACCCGCGCT | AKNA |
| 67 | ALX3_a | CCTGCACCCGGCCCCTATG | ALX3 |
| 68 | ALX4_a | TGCGACACCGGGCTGTAGT | ALX4 |
| 69 | ANHX_b | AAGCGGGTCCCGGAGGGTG | ANHX |
| 70 | AR_a | GCTTGCTGGGAGAGCGGGA | AR |
| 71 | ARHGAP35_a | CAGTGTGGTGGGATTATCT | ARHGAP35 |
| 72 | ARID3C_a | AGAGGTATCAGGCAGAGAC | ARID3C |
| 73 | ARID5B_a | AGAAAGAGGAGCAGCGCCC | ARID5B |
| 74 | ASCL5_a | TGGCTCCCGGTGCTGTGGC | ASCL5 |
| 75 | ATF6B_a | GGCCTTGGGAACCGTCTCC | ATF6B |
| 76 | ATOH7_a | CTTCCTGCAAAGGAGTCTC | ATOH7 |
| 77 | BARHL1_a | TCTAATGCGCAGAGGAGGT | BARHL1 |
| 78 | BARHL2_a | TTTCTTCGCTGGTTCGGGG | BARHL2 |
| 79 | BATF_a | CAGAGTGAGGAGGACGCAG | BATF |
| 80 | BBX_a | AGCCCTCAGCGGCCAGTCA | BBX |
| 81 | BHLHE40_a | TCCGACTCAGCGCACAGAC | BHLHE40 |
| 82 | BNC2_a | AGAGGAGACCAAGAGGCGG | BNC2 |
| 83 | BRD4_a | CAGTGGCAACACCCACAAG | BRD4 |
| 84 | BRD9_a | CCAGCGAGCTCGGCAACCT | BRD9 |
| 85 | BSX_a | GACAAGGGCCGGGACGAAG | BSX |
| 86 | CCDC17_a | TGGGTGGCTAACAGAGCTG | CCDC17 |
| 87 | CDX1_a | CGGTTGCTCGTCGTCGGGG | CDX1 |
| 88 | CDX2_a | CCTTCCCACTAGGCTGCAG | CDX2 |
| 89 | CDX4_a | GTTTCTTACGAGGGTATCC | CDX4 |
| 90 | CEBPB_a | GTGGCCGCTATTAGTGAGG | CEBPB |
| 91 | CENPB_a | CGGGCCGGGGGCACCTCCG | CENPB |
| 92 | CLOCK_a | CGCCGCCAAGGAAGCCAAC | CLOCK |
| 93 | CREB3_a | TGGGAGGCGGGTCCGGAGA | CREB3 |
| 94 | CREB3L4_a | AAAGCGAGGGCTACAGAAC | CREB3L4 |
| 95 | CSRNP3_a | CACGGCATCAGCCTCACTG | CSRNP3 |
| 96 | CTCF_a | CGCGGAGCTGCTTCTTTGG | CTCF |
| 97 | CUX1_a | TGAGCGGCTGATAGAGAGG | CUX1 |
| 98 | CUX2_a | GCGCGCCCTGGGCGCATTG | CUX2 |
| 99 | DACH2_a | GGCCCGGAATAAGCCCCCC | DACH2 |
| 100 | DLX1_a | CTCCCCAGGAACCAACCAG | DLX1 |
| 101 | DLX4_a | AAGCGGAAGCCAGCACGCA | DLX4 |
| 102 | DLX5_a | GCCGCGGCGAGGAGGAGAC | DLX5 |
| 103 | DLX6_a | GAGTGGCTCATGTAGGGGT | DLX6 |
| 104 | DMRTB1_a | AGGCTGGGCATCGCCACGG | DMRTB1 |
| 105 | DNMT3B_a | GACTCGCCCCCAATCCTGG | DNMT3B |
| 106 | DOTIL_a | GCTTCACGCCGGCCCAAGA | DOTIL |
| 107 | DPF1_a | CTACGATTTCATTCATTCT | DPF1 |
| 108 | DR1_a | GTAGCCCGAACGCAGATCG | DR1 |
| 109 | E2F2_a | GCGATGCGCTGGGATGGGG | E2F2 |
| 110 | E2F3_a | CCCGGAGGGCCGAACAGAC | E2F3 |
| 111 | EBF3_a | GGAAAGGGTCCATTCCTCG | EBF3 |
| 112 | EGR2_a | CAGCAGCCGGAACACAGAC | EGR2 |
| 113 | EHF_a | AATCTCACCAGCTCCTATA | EHF |
| 114 | ELF5_a | GTGGCTAGGTCCAAAGAGG | ELF5 |
| 115 | ELF5_b | AGGCTTTCAAGGCAAGAGA | ELF5 |
| 116 | ELMSAN1_a | GCGCCGTTGGCCTGAGGTA | ELMSAN1 |
| 117 | EMX1_a | AGGCCGCTAGAATGGACCC | EMX1 |
| 118 | ETS2_a | CTCCAGAGACTGACGAGTG | ETS2 |
| 119 | ETV4_a | CCTCAGGTGAGGCTGCGGG | ETV4 |
| 120 | ETV4_b | CTTTTGTGAATGGAACCCC | ETV4 |
| 121 | ETV6_a | CGGCTGCCGGGAGAGATGC | ETV6 |
| 122 | EZH1_a | ACCCGCGGCTCGGGATGGA | EZH1 |
| 123 | FERD3L_a | CACATCCATTGGCAGATGG | FERD3L |
| 124 | FERD3L_b | AACAAGGAACTGTCCCGGG | FERD3L |
| 125 | FIZ1_a | CCGACATTTTGGGCAGCGG | FIZ1 |
| 126 | FOS_a | TAGTAAGAGAGGCTATCCC | FOS |
| 127 | FOSB_a | CAGAGCTACGGCCACGGCA | FOSB |
| 128 | FOXA1_a | GCAGCCCGCTCACTTCCCG | FOXA1 |
| 129 | FOXA2_a | AGCTACTATGCAGAGCCCG | FOXA2 |
| 130 | FOXA3_a | CTCGGGACAGCCGTACCCC | FOXA3 |
| 131 | FOXC2_a | CGGCGCTCGGGCCGAGCAG | FOXC2 |
| 132 | FOXD3_a | CGCAGGGTGCAGGCCGTAG | FOXD3 |
| 133 | FOXE1_a | TCCCCTGCACACACCGGAC | FOXE1 |
| 134 | FOXJ3_a | GGCCTCGACCGCTCGCAGT | FOXJ3 |
| 135 | FOXN2_a | AGTCGCCTCCGGGAAGACG | FOXN2 |
| 136 | FOXN4_a | ACGCGAGGGGCGAGCGCGA | FOXN4 |
| 137 | FOXO1_a | CCGCAGGAGAGCCAAGAGG | FOXO1 |
| 138 | FOXP3_a | AGAGCAGGGACACTCACCT | FOXP3 |
| 139 | FOXS1_a | ATGACCGCAAGCCAGGCAA | FOXS1 |
| 140 | GATA2_a | GCGAGGCCAGCGTCGCCCC | GATA2 |
| 141 | GATA3_a | TCGCTACCCAGGTTGGTAC | GATA3 |
| 142 | GATAD2A_a | CTCCATGTGTGCGGCCGAG | GATAD2A |
| 143 | GCM2_a | CAATGGTTATGGACCCGGG | GCM2 |
| 144 | GFI1_a | GGCTCGGCGGACCTACCTG | GFI1 |
| 145 | GLI2_a | TTGCTTGCCAAGGGGCCCA | GLI2 |
| 146 | GLYR1_a | CGGCTGTGAGTCTGCGGCT | GLYR1 |
| 147 | GPBP1L1_a | CAGCTTGTCGACCCGGCAG | GPBP1L1 |
| 148 | GRHL1_a | ACAGTACACCCGATCCGGG | GRHL1 |
| 149 | GTF2B_a | GCCTCCGGGCAGCCTCGTA | GTF2B |
| 150 | GTF2I_a | GCGAGGGGCCCGTGCGTGT | GTF2I |
| 151 | HDAC2_a | GCTCGGTACCACCCGGCAG | HDAC2 |
| 152 | HES2_a | GGGTCTCAACTGTTACGTG | HES2 |
| 153 | HES7_a | GGAGGAGCAATGGTCACCC | HES7 |
| 154 | HESX1_a | GCTCTGCCCCACGTGTATA | HESX1 |
| 155 | HEY1_a | GAGCTGGACGAGACCATCG | HEY1 |
| 156 | HIF3A_a | TACGAGTGGGTGCGCACGG | HIF3A |
| 157 | HIVEP3_a | GGAGAACTGTGTTGGAGGG | HIVEP3 |
| 158 | HLF_a | AGGAAAAGTGATAAAAGAG | HLF |
| 159 | HLX_a | GCAGTAAGCGGCCGACCAG | HLX |
| 160 | HMG20A_a | AAGTGAAGGCGATTGAGAG | HMG20A |
| 161 | HMGA2_a | ATCAACACCGGACGTCCAG | HMGA2 |
| 162 | HMGA2_b | TTCGGGAGATGAGGTGATA | HMGA2 |
| 163 | HMGA2_c | GTCCCTGGGCTGAAGTGGA | HMGA2 |
| 164 | HMGN3_a | CCTCATTGGAGCAGCAGGG | HMGN3 |
| 165 | HMX2_a | GGGACATGCAGGCACCGGA | HMX2 |
| 166 | HNF1A_a | ATGTAAACAGAACAGGCAG | HNF1A |
| 167 | HNF4G_a | AGATTCTATATAATTCAAG | HNF4G |
| 168 | HNF4G_b | AGCCGCCCGAGGGGAACCG | HNF4G |
| 169 | HOXA1_a | TTCTTCTCCGGCCCCATGG | HOXA1 |
| 170 | HOXA11_a | GGCGCGAAGACGGGGTCTG | HOXA11 |
| 171 | HOXB1_a | ATACTGCCGAAAGGTTGTA | HOXB1 |
| 172 | HOXB2_a | GGTGGGGAGATTTTCCCCT | HOXB2 |
| 173 | HOXB3_a | TTAACTGCTCGCTGTGGTG | HOXB3 |
| 174 | HOXC12_a | ACACTGGGCTGCCGAGGTA | HOXC12 |
| 175 | HOXC9_a | CCGTACGGGTGATATACCA | HOXC9 |
| 176 | HOXC9_a | GGCTTGGGCGCGAAGCTAC | HOXC9 |
| 177 | HOXD9_a | CGGCGGACAGTGTAATGTT | HOXD9 |
| 178 | HSF4_a | GCATGGTGCAGTCTCGGCC | HSF4 |
| 179 | HSF5_a | CAGGGCGAGGCGAAGGCCG | HSF5 |
| 180 | IKZF1_a | TGCGCCGCGCGGGGACCCA | IKZF1 |
| 181 | IKZF2_a | GCAGTGGATCTGTAGCTAA | IKZF2 |
| 182 | IKZF3_a | GCGCGCTGAGTCCAGGCGA | IKZF3 |
| 183 | IKZF4_a | TCCCTCGCCGTTTCCAAGG | IKZF4 |
| 184 | IRF7_a | CTCTGGCACCCAGGTACTG | IRF7 |
| 185 | IRX3_a | GTAAGGCAGCCAAAAGTTG | IRX3 |
| 186 | ISL2_a | ACTAACTCCTACTGCCCCG | ISL2 |
| 187 | JRK_a | AGTGGCCGGCACTTCCGGC | JRK |
| 188 | JRK_b | TCCTGACCGTCATCAGCAA | JRK |
| 189 | JRKL_a | GACTGCCGCGCGATAGTCA | JRKL |
| 190 | KAT7_a | GCTCCAGACGCTGAGAGGC | KAT7 |
| 191 | KDM1A_a | CACGGAGCGACAGAGCGAG | KDM1A |
| 192 | KDM2B_a | CTCGGCTTCCATACCTATA | KDM2B |
| 193 | KDM5D_a | AACTAGGATCCCTGACGAT | KDM5D |
| 194 | KLF14_a | CTCGGCGGCGAAGTAGTCC | KLF14 |
| 195 | KLF9_a | CAAGGGAGCCGGCTCAGAG | KLF9 |
| 196 | KMT2B_a | CATCTTGGCACCGTGAGAG | KMT2B |
| 197 | KMT2B_b | GGGCCAAAAAAGTAAAGAT | KMT2B |
| 198 | L3MBTL4_a | ACGCCGACCGAGCTACAGG | L3MBTL4 |
| 199 | LEF1_a | GCTCTCGGGCCGAGGAACC | LEF1 |
| 200 | LHX6_a | AGAAGCTGGCGGACATGAC | LHX6 |
| 201 | LHX9 | GGGAACTTGCAAGCAGCCA | LHX9 |
| 202 | LIN28A_a | AAGTCCGAAGGCAAAGGGT | LIN28A |
| 203 | LIN28A_a | CGTGCGCGCCAGACTACGT | LIN28A |
| 204 | LMX1A_a | CCTCCGGCTGCAGTCTCGG | LMX1A |
| 205 | MAF_a | AGAGGTGCAGCCCGACTGG | MAF |
| 206 | MAFF_a | CCCGGTTCAGAGCGACCTG | MAFF |
| 207 | MBD3_a | AGAAGTGCCCAGAAGGTCG | MBD3 |
| 208 | MBD4_a | CCGGTGCCGTGAGCTGAAG | MBD4 |
| 209 | MBNL2_a | GAAAGCCGTCTGCCGTATC | MBNL2 |
| 210 | MED1_a | AAGAAGAGAAGGGTGCTCG | MED1 |
| 211 | MED14_a | CTGCAGAGGACCTTCCGAC | MED14 |
| 212 | MED23_a | AAGCGACGCCGAGGAGCTA | MED23 |
| 213 | MED24_a | TGTGCGGTAGGCTTAAATT | MED24 |
| 214 | MEF2C_a | TAGCAGCCCGAAGATGTCT | MEF2C |
| 215 | MEF2D_a | CGGGAGTCGAGGCCGACGT | MEF2D |
| 216 | MEIS3_a | CAACACCGCGGGCCGTCAG | MEIS3 |
| 217 | MESP1_a | CTGGAGACTCTCCTCGCTG | MESP1 |
| 218 | MESP1_b | GCCTAGCACGGCCGACAGG | MESP1 |
| 219 | MGA_a | GACCACAGGGGCGCGCCAA | MGA |
| 220 | MITF_a | TTGGAATTATAGAAAGTAG | MITF |
| 221 | MLX_a | CCTTGACCCAAGGGTCCTC | MLX |
| 222 | MNX1_a | GCGCGGGTCCCCACCACGG | MNX1 |
| 223 | MYF5_a | CCGATGGGCAAATCCCGGG | MYF5 |
| 224 | MYOG_a | CGGGGTTCCTGGTAGAAGT | MYOG |
| 225 | MYPOP_a | GGAGCCGGTGAGTGACCCG | MYPOP |
| 226 | MYRFL_a | CTTCATTATCAGAAAGTAG | MYRFL |
| 227 | MYTIL_a | GTGCTTCAACAAGACTGCA | MYTIL |
| 228 | NCOR1_a | TCCCGGGGCAGCAGCCGCT | NCOR1 |
| 229 | NEUROG1_a | CTCGTGTGAGCACCGAGTG | NEUROG1 |
| 230 | NFAT5_a | GTCCCCGTCCCGCCGGGGG | NFAT5 |
| 231 | NFATC2_a | GCGATCCGGCTTACTCCAG | NFATC2 |
| 232 | NFATC2_b | AGAGGCTGCGTTCAGACTG | NFATC2 |
| 233 | NFATC3_a | GAGGCTTAGGCACCGGTGG | NFATC3 |
| 234 | NFE2L1_a | CCCTGGAGGCTAGAAGCTC | NFE2L1 |
| 235 | NFE2L3_a | GGGTCCGCACGTGTCACCC | NFE2L3 |
| 236 | NFIA_a | TCCACGCCGCGGCTTACCT | NFIA |
| 237 | NFYB_a | CCCCGGGCCCGGAGCTCAA | NFYB |
| 238 | NKX1-2_a | CGGGAAGCCAGGAAAAGTT | NKX1-2 |
| 239 | NKX2-3_a | GTCTGTCAAAAGCCCGACT | NKX2-3 |
| 240 | NKX2-4_a | GCCTGTGACGAGGAGTCGG | NKX2-4 |
| 241 | NKX2-5_a | GCCAGCTCTGGATGTGTCC | NKX2-5 |
| 242 | NOTCH3_a | TGGGCTCCGGGCGCGTCCC | NOTCH3 |
| 243 | NOTO_a | CAGGAGGTTCCCAGACAAC | NOTO |
| 244 | NOTO_b | CCTGGGGCTAGGCATGACG | NOTO |
| 245 | NR1H2_a | GCGGGGTTGCCGGAAGAAG | NR1H2 |
| 246 | NR1H4_a | AAATCGCTGGGATCTGGAG | NR1H4 |
| 247 | NR112_a | AATACTCCTGTCCTGAACA | NR1I2 |
| 248 | NR2C2_a | CCGCCGCCCGCGCGCTGGT | NR2C2 |
| 249 | NR2F1_a | GAATGGAGTAAAAGAGACA | NR2F1 |
| 250 | NR5A2_b | TCCGGCGAAAAGAAGGAAG | NR5A2 |
| 251 | OSR2_a | GCCCAAGACTCCCGGCCTG | OSR2 |
| 252 | OTX1_a | CACTCCCGGTGCAACGTGG | OTX1 |
| 253 | OVOL1_a | AACAGGGAAGGAGTCGCTA | OVOL1 |
| 254 | PA2G4_a | CCCAGGCTGAAGTCTATGG | PA2G4 |
| 255 | PATZ1_a | CTGTGGAGCCAGAACTGGG | PATZ1 |
| 256 | PAX9_a | CTGTCAGAGCCGGGAAGGG | PAX9 |
| 257 | PAX9_a | GACACGACCGGAGCCCTGC | PAX9 |
| 258 | PBX4_a | TGGAGGCCAGACTGACGAG | PBX4 |
| 259 | PGR_a | CCACAGCTGTCACTAATCG | PGR |
| 260 | PITX1_a | AGACTCTGCCGGCGCCGTC | PITX1 |
| 261 | PITX3_a | CAGGAGCGCCCGAGCGGAG | PITX3 |
| 262 | PITX3_b | TCGGGCGCTCCTGGACTCT | PITX3 |
| 263 | PITX3_c | GCTGCGGCGGCGATCTAGA | PITX3 |
| 264 | POU2F2_a | ATGGTTCACTCCAGCATGG | POU2F2 |
| 265 | POU3F1_a | GCCCGCAGACGGAGCGGAG | POU3F1 |
| 266 | POU3F2_a | AGTCCGGCTCCGAGAGTCA | POU3F2 |
| 267 | POU3F3_a | GCTGTTCCCCGGCAGGTAG | POU3F3 |
| 268 | POU5F1_a | AGGCAAGTGAGCTTCGACG | POU5F1 |
| 269 | PRDM1_a | GCCTCTCCGCAACACTGGA | PRDM1 |
| 270 | PRDM16_b | GCCGACACCATGCGATCCA | PRDM16 |
| 271 | PRDM7_a | GCGAAGCCAGACTCCCAGC | PRDM7 |
| 272 | PRR12_a | TCCTCCTCCTCTGCGCTCA | PRR12 |
| 273 | PRRX1_a | GCGGCCGCTTGGACAGCCC | PRRX1 |
| 274 | RBCK1_a | AGGCCCCAGTTCTTCGCAA | RBCK1 |
| 275 | RHOXF1_a | GAAGAAAAGGGCCAATAGG | RHOXF1 |
| 276 | RUNX2_a | CTGACTCTGTTGGTCTCGG | RUNX2 |
| 277 | SALL3_a | GGATGCGCGCGTCCGGGAG | SALL3 |
| 278 | SIM1_a | GTTCACTATTATTCCTAAT | SIM1 |
| 279 | SIX1_a | GGCAACTAGCAGCATCCAC | SIX1 |
| 280 | SIX6_a | GGGAGCGGACGACCCCGAC | SIX6 |
| 281 | SKI_a | TGGATGTGGCGCCGGGCCC | SKI |
| 282 | SKIL_a | TCGCTAGGCGGGTGTTCCA | SKIL |
| 283 | SKOR1_a | CGCCATGCGCTCCAGGCTT | SKOR1 |
| 284 | SMAD2_a | GGACCCCCCGGATCTGACG | SMAD2 |
| 285 | SMAD5_a | CGCGGGCGAGGGGAACTGG | SMAD5 |
| 286 | SMYD3_a | TACGCACCCGAGAAGGCAG | SMYD3 |
| 287 | SNAPC2_a | GCGCCTGCCTCTTTCTGAG | SNAPC2 |
| 288 | SOX1_a | GAGCATAGACGGCCGGGGT | SOX1 |
| 289 | SOX14_a | CGAGGGGAGCGCAGAACCC | SOX14 |
| 290 | SOX30_a | CATCCGCCGTGGTGAGACC | SOX30 |
| 291 | SOX5_a | GGTCGCTTGGAAGACATCC | SOX5 |
| 292 | SOX6_a | AATGGAGAGGTGGCTTGCT | SOX6 |
| 293 | SP2_a | AGGAAGATGTCGTAATGAG | SP2 |
| 294 | SP3_a | TAGCGGCCAGCAGAGCGAG | SP3 |
| 295 | SP5_a | GCGCGGCGAGGGGCAAGGG | SP5 |
| 296 | SP8_a | AAAAAGATCCTCTGAGAGG | SP8 |
| 297 | SP9_a | CTATGGCCACGTCTATACT | SP9 |
| 298 | SPIB_a | GAGGCTGCACAGTAAGTGA | SPIB |
| 299 | STAT5B_a | GCGGCGCGGCCCTGACGGG | STAT5B |
| 300 | T_a | CCGGCGTCGGGTGTCCCCG | T |
| 301 | TBPL1_a | TATTGTCGCGGGGAAGCTG | TBPL1 |
| 302 | TBX5_a | GTACCTCCCAGCTCAAGGT | TBX5 |
| 303 | TBX6_a | TCGCGCCAGGGTTTCCCGA | TBX6 |
| 304 | TCF12_a | CCCCCCGAATAGAACTTGT | TCF12 |
| 305 | TCF23_a | AGGACAAGGCAGGACCCGT | TCF23 |
| 306 | TCF3_a | TAGCGGGCCGGAGCCGACG | TCF3 |
| 307 | TFAP2A_a | CCGCCGCTAAGAAAAGAGG | TFAP2A |
| 308 | TFAP2A_b | CCAGAGAGTAGCTCCACTT | TFAP2A |
| 309 | TFAP2E_a | CCATGGAGGCAGGACGGAC | TFAP2E |
| 310 | TFDP2_a | AGTCTTTGTTACCATTCAG | TFDP2 |
| 311 | TFDP3_a | GGTGTGAACGGCCACGGGG | TFDP3 |
| 312 | TGIF2_a | TCCCTGTCGGAGAGATCGG | TGIF2 |
| 313 | TGIF2LX_a | ATATGGAGGCCGCTGCGGA | TGIF2LX |
| 314 | THAP6_a | CAGGCTCCCCGCCACCGGA | THAP6 |
| 315 | THRA_a | TGCTGGGGGCGTCCATGGG | THRA |
| 316 | TIGD1_a | CGGGCGGGTCACAAGGACC | TIGD1 |
| 317 | TIGD3_a | GGCGGCGACAGCAGAACAG | TIGD3 |
| 318 | TIGD5_a | CCATCGAGCGCGTCAAGGG | TIGD5 |
| 319 | TLX3_a | CCGACGGCGCCAGCTACCT | TLX3 |
| 320 | TOX_a | CGGAACAGAGTGAGGTGTC | TOX |
| 321 | TOX2_a | CGCGGGCGCCGAGGGGTAC | TOX2 |
| 322 | TRIM27_a | GCTCTCGCTTAGGGGGCAC | TRIM27 |
| 323 | TRIM27_a | AGGCTCGCGGCCACGCTAG | TRIM27 |
| 324 | TRIM40_a | AATTTCAGATCATCTTCTC | TRIM40 |
| 325 | TRIM52_a | TAGCCAGCGGCTGCATCTG | TRIM52 |
| 326 | TSHZ2_a | ACACACACAAGACAGGGCG | TSHZ2 |
| 327 | VAX1_a | TGTCCCCAGCCTGGCGATC | VAX1 |
| 328 | VEGFA_a | CCGGGTAGCTCGGAGGTCG | VEGFA |
| 329 | VSX1_a | ATAGCATGGGATCATGCTC | VSX1 |
| 330 | VSX1_b | CAGCGTGATGGCCGAGTAC | VSX1 |
| 331 | WNT1_a | GCTCGCGGTCCCGGCTGGT | WNT1 |
| 332 | WNT3A_a | GCTCACTCACCACCAGATC | WNT3A |
| 333 | YBX1_a | TCGAACTAGCGAGAATGGC | YBX1 |
| 334 | YY1_a | GCGGCTGCAGAGCGATCAT | YY1 |
| 335 | YY2_a | AGAGAAAGGCGCGAGACTG | YY2 |
| 336 | YY2_b | AGGAAGGGGCGAGCTGCAG | YY2 |
| 337 | ZBED5_a | CAGCTCAGGGATATCGCCT | ZBED5 |
| 338 | ZBED5_b | ATCTCTATGGAGATGGCCT | ZBED5 |
| 339 | ZBTB2_a | GTGTGGAGGAGGCGCCTCT | ZBTB2 |
| 340 | ZBTB21_a | GATGGAATCACAGCGGCAG | ZBTB21 |
| 341 | ZBTB38_a | CACGGGTCCGGAAGCACCA | ZBTB38 |
| 342 | ZBTB4_a | CGCCTGCGCAGGCCCGCAA | ZBTB4 |
| 343 | ZBTB40_a | CGCCGGAGACGCCAGAAGG | ZBTB40 |
| 344 | ZBTB42_a | GCCGGGAAGGGCGCTTCGT | ZBTB42 |
| 345 | ZBTB49_a | TCTGTGCCGGGCATCACAG | ZBTB49 |
| 346 | ZBTB7B_a | GCGGCCTTCTGACCAGGAC | ZBTB7B |
| 347 | ZBTB7B_b | AGCAGGGCCCCAAGCCCCC | ZBTB7B |
| 348 | ZBTB7C_c | CGCCACGAGACTCTGACAG | ZBTB7C |
| 349 | ZBTB8B_a | GTCGGTGCGCGGTGCTCCG | ZBTB8B |
| 350 | ZBTB9_a | GTCGGCGGGAAGGACAATC | ZBTB9 |
| 351 | ZC3H8_a | ACCCGAGAGAGTGACAACC | ZC3H8 |
| 352 | ZEB2_a | CCTCGCCAAGAGTGTCGGG | ZEB2 |
| 353 | ZFHX2_a | CTCTACCTAAAGCTGAACT | ZFHX2 |
| 354 | ZFHX3_a | TGCCGCCGAGCAGCATGGT | ZFHX3 |
| 355 | ZFP28_a | GCCTCGGGTGACATGCGGG | ZFP28 |
| 356 | ZFP41_a | CCGGTGCCTAGGGCCGACG | ZFP41 |
| 357 | ZFP69B_a | CTGCAGCGGTGGGAAGGCG | ZFP69B |
| 358 | ZFP90_a | GCAAGGCGCGAAACCCACC | ZFP90 |
| 359 | ZGLP1_a | TAAAGGCCCCACCTAGCTC | ZGLP1 |
| 360 | ZHX3_a | GGAGCCGCGGACTGCTGAG | ZHX3 |
| 361 | ZIC5_a | GCTACACCACCACCAACAG | ZIC5 |
| 362 | ZKSCAN1_a | GAGGGCCTAAGTCCGTGTG | ZKSCAN1 |
| 363 | ZKSCAN1_b | GGCCGAAGGGCACCGCACA | ZKSCAN1 |
| 364 | ZKSCAN2_a | CAGGGCTCGCAGGGGGCAG | ZKSCAN2 |
| 365 | ZKSCAN7_a | CCGCGTCTCGGCCCACTCG | ZKSCAN7 |
| 366 | ZNF107_a | AGCCACAGCCACTTCCGAT | ZNF107 |
| 367 | ZNF121_a | TCCCAGTCAGGAGCCAGGT | ZNF121 |
| 368 | ZNF132_a | AGCAAAATGAGGACCGCAA | ZNF132 |
| 369 | ZNF135_a | CTTTGTCTCGCAGTCAGGA | ZNF135 |
| 370 | ZNF135_b | AGGGTGAGCTAGGCCGGCG | ZNF135 |
| 371 | ZNF140_a | CGTTGCCTACAGCCAACAC | ZNF140 |
| 372 | ZNF141_a | AGCTGTGGCCGAATCACCA | ZNF141 |
| 373 | ZNF222_a | GGTTGCGAGCCCCAAGGAA | ZNF222 |
| 374 | ZNF225_a | CAACCTCACAGTAACGGAG | ZNF225 |
| 375 | ZNF229_a | AGGCCATGGGAATTAGGAT | ZNF229 |
| 376 | ZNF230_a | TCGTTGCGACCCCAAGCGA | ZNF230 |
| 377 | ZNF248_a | TGCAGGAGCCGTCTCCCTC | ZNF248 |
| 378 | ZNF25_a | ACCAGGCGGCTCCCACCCA | ZNF25 |
| 379 | ZNF26_a | ACACCCGCTGGCCAGATTC | ZNF26 |
| 380 | ZNF267_a | TACATCACCTCAAATAAAA | ZNF267 |
| 381 | ZNF280C_a | TGGGGTTCGGATAAGGAGG | ZNF280C |
| 382 | ZNF281_a | GACCCGTAAGTATTGCCGG | ZNF281 |
| 383 | ZNF283_a | ACCTTAAGGACACCGGAAA | ZNF283 |
| 384 | ZNF286B_a | GTGCTGCTCTCATTCCGCC | ZNF286B |
| 385 | ZNF304_a | CAACCAGAATGCACGGACC | ZNF304 |
| 386 | ZNF317_a | ATCGGGGGAGCGGAGGTGA | ZNF317 |
| 387 | ZNF317_b | GACACGAGGGGTCCCCAAC | ZNF317 |
| 388 | ZNF318_a | CACGGCGACAGCTCTGACC | ZNF318 |
| 389 | ZNF320_a | AGCCGCCGAGAGCGACGGT | ZNF320 |
| 390 | ZNF33B_a | AGGAACTGGCGTAGCGTCC | ZNF33B |
| 391 | ZNF346_a | CAGGCCGCGGACGGCGGAG | ZNF346 |
| 392 | ZNF358_a | CGCTCCCGGGGAGCGAGAG | ZNF358 |
| 393 | ZNF367_a | TGTAACGCGGGAAAAGCCG | ZNF367 |
| 394 | ZNF382_a | CACGGACGCAGCCACAGAA | ZNF382 |
| 395 | ZNF383_a | CAAGGGTAGGGGAAGTGCG | ZNF383 |
| 396 | ZNF385B_a | CGGCGCGCGAGAGTGGCGT | ZNF385B |
| 397 | ZNF385B_b | GCCCGGCGCGGGCAAGAGT | ZNF385B |
| 398 | ZNF391_a | CCCGCCCGGGGTGTGTCGG | ZNF391 |
| 399 | ZNF415_a | AACGGATCGCGTTGGGTGA | ZNF415 |
| 400 | ZNF423_a | CCTTGCCTGGGGAGGATGA | ZNF423 |
| 401 | ZNF43_a | CTCCGGCACGCGCAGATTG | ZNF43 |
| 402 | ZNF43_b | CAGCTCTGCAGCCGCAACG | ZNF43 |
| 403 | ZNF432_a | CAGGGCGTGGAAACGTGGT | ZNF432 |
| 404 | ZNF433_a | CAGGCGGCGAGCTGAGGTT | ZNF433 |
| 405 | ZNF436_a | TCAGAAACCACAGGCTCAT | ZNF436 |
| 406 | ZNF441_ | AATCAGGCGCACTGACCGG | ZNF441 |
| 407 | ZNF441_b | CGTGCGGCCGAGGGAACCG | ZNF441 |
| 408 | ZNF443_a | GGAGCTGTCGGTAGGACCT | ZNF443 |
| 409 | ZNF461 | AGGAATGGTCTCCGGGTAG | ZNF461 |
| 410 | ZNF462_a | TGCCGGGTCTCAGCAATGG | ZNF462 |
| 411 | ZNF468_a | AAACGTATACATTGCCCTA | ZNF468 |
| 412 | ZNF473_a | CTGCGAGGAGGCGCGTGTG | ZNF473 |
| 413 | ZNF483_a | CGGATGCTGATGCAGGTAC | ZNF483 |
| 414 | ZNF486_a | TCGCTGCATCTGGAGCTCT | ZNF486 |
| 415 | ZNF491_a | GACTGGATGCAGAACGCAA | ZNF491 |
| 416 | ZNF507_a | TGGAGCTCCGGATGAGGAG | ZNF507 |
| 417 | ZNF514_a | AGAGGCAGGCAGTACTTCA | ZNF514 |
| 418 | ZNF519_a | CACAGAGCGACGGAGTGAG | ZNF519 |
| 419 | ZNF519_b | CAGCCAGAGCGCGGGGTTA | ZNF519 |
| 420 | ZNF540_a | ACGGGCCCTAGCGGCTTGG | ZNF540 |
| 421 | ZNF543_a | GCTGGACGCGCCTACCCAG | ZNF543 |
| 422 | ZNF546_a | GCAATGTAAAGGGCCCTTG | ZNF546 |
| 423 | ZNF549_a | GCCGGAAACGCCCAGCCCG | ZNF549 |
| 424 | ZNF555_a | GCCAGGGACCGCTAGGGGC | ZNF555 |
| 425 | ZNF562_a | CACCACAATAAAGGTTAAA | ZNF562 |
| 426 | ZNF567_a | CGGCCGGCAACCGAAGGTG | ZNF567 |
| 427 | ZNF569_a | GTCTCGGTCCGTTACACCA | ZNF569 |
| 428 | ZNF574_a | ACTGAGGTAGTGACTGAGG | ZNF574 |
| 429 | ZNF577_a | GCAGTGTGTGGGGTTCGCG | ZNF577 |
| 430 | ZNF596_a | CCGCAGGAAGGGAACTGCG | ZNF596 |
| 431 | ZNF610_a | AAGCGCGGGGCAGGACGTT | ZNF610 |
| 432 | ZNF616_a | CCCCTCCAGGCGTCGACAA | ZNF616 |
| 433 | ZNF621_a | CACGGTCCGGGTGAAGGAG | ZNF621 |
| 434 | ZNF626_a | TGGGAGAGACGCCACGCTG | ZNF626 |
| 435 | ZNF627_a | ACGCGAGCCCGGGTGGGGA | ZNF627 |
| 436 | ZNF629_a | CTTCTCAAGGGGTGATTCC | ZNF629 |
| 437 | ZNF630_a | CACTCACCCGGACAAGTCG | ZNF630 |
| 438 | ZNF630_a | ATCCTACGAAAGCAGTGTG | ZNF630 |
| 439 | ZNF641_a | CGGCGGAGCCAGCGACAGG | ZNF641 |
| 440 | ZNF645_a | CACATTCTTGTTCACCAGC | ZNF645 |
| 441 | ZNF658_a | ACCAAAGAGGTCGTTGTGA | ZNF658 |
| 442 | ZNF660_a | GCTACGAGGAGTCAGAGAC | ZNF660 |
| 443 | ZNF662_a | TGGAGTCGGGGTCTTACTC | ZNF662 |
| 444 | ZNF677_a | GCGAGATCCGCTTCCGGGT | ZNF677 |
| 445 | ZNF682_a | GACTCCAGTCCGCAGACTC | ZNF682 |
| 446 | ZNF697_a | GCCCCAGGGGAGCGGACAA | ZNF697 |
| 447 | ZNF703_a | TGCTAGCCGGGGCCAGCGG | ZNF703 |
| 448 | ZNF705A_a | TGAGTATATTCAGGAGGAT | ZNF705A |
| 449 | ZNF705B_a | TAGCCCCAGTTGGCCCTAC | ZNF705B |
| 450 | ZNF705G_a | TTGGAACACCCAGGCAGGG | ZNF705G |
| 451 | ZNF716_a | GGACGCTTCCGTAAGGTTA | ZNF716 |
| 452 | ZNF729_a | CGAGATGGGAAAGAACTCC | ZNF729 |
| 453 | ZNF750_a | TGGGCTCCGAGGATTACTC | ZNF750 |
| 454 | ZNF75A_a | CTGGCTCTGTACCTGGACA | ZNF75A |
| 455 | ZNF765_a | ACTGGGAGGCGCTCAGGGA | ZNF765 |
| 456 | ZNF771_a | TCGGCGACCTGGAGCTCTG | ZNF771 |
| 457 | ZNF773_a | GGAAGCTGGTTGTTCGCTG | ZNF773 |
| 458 | ZNF773_b | GCAAGCTGAGTTCTCTTGA | ZNF773 |
| 459 | ZNF773_c | TCGCTGCGGCGACCAGCTC | ZNF773 |
| 460 | ZNF774_a | GGCACAGCCTCGGGGTTGC | ZNF774 |
| 461 | ZNF778_a | GACAGCCCGAGGACACGCG | ZNF778 |
| 462 | ZNF778_b | TCCCGGACCAGCTTCCCCG | ZNF778 |
| 463 | ZNF784_a | GCTCCTGGGATCGCGACTC | ZNF784 |
| 464 | ZNF789_a | GGAACAGACACAACCACTC | ZNF789 |
| 465 | ZNF804B_a | CGAGGTGGCTGCTCAACCG | ZNF804B |
| 466 | ZNF816_a | GAGCAGATTCGCACAAACC | ZNF816 |
| 467 | ZNF823_a | TCCCCTGGGCCGCAAGATG | ZNF823 |
| 468 | ZNF83_a | TGAGGACGATAGAACGATT | ZNF83 |
| 469 | ZNF83_b | CTTCATGCTACACAGTCCA | ZNF83 |
| 470 | ZNF831_a | CCCGCGCCCCGCTAGTGAC | ZNF831 |
| 471 | ZNF846_a | GACGCTCCGGACTTCTGCT | ZNF846 |
| 472 | ZNF852_a | CGTTTGGATGATTGTCTCT | ZNF852 |
| 473 | ZNF879_a | ACACCGCACAAGAGGCGAG | ZNF879 |
| 474 | ZNF91_a | CGCTGCCGCCGGAGTTTCC | ZNF91 |
| 475 | ZNF93_a | AACAGGGCGGCTTCTGGTT | ZNF93 |
| 476 | ZNF99_a | CACAGGGCCACAGAGGCTA | ZNF99 |
| 477 | ZNF99_a | TAGTCACAGTGCAGGAAGG | ZNF99 |
| 478 | ZSCAN16_a | CAGCCTTCCGGGAGAGGAT | ZSCAN16 |
| 479 | ZSCAN2_a | CCTCTCCGGCTCACCTCTC | ZSCAN2 |
| 480 | ZSCAN21_a | TCAGAGCCGCTCCGGGTAC | ZSCAN21 |
| 481 | ZSCAN5A_a | TAACTTTCTCATCAAGCTT | ZSCAN5A |
| 482 | ZSCAN5A_b | TCCGCGTCGAGGCCCTACG | ZSCAN5A |
| 483 | ZSCAN5B_a | ATTCATGTGCCAAGTCTCA | ZSCAN5B |
| 484 | ZSCAN5B_b | GGTGAGTGTCCAGCGGCGA | ZSCAN5B |

[0601] 27 of the 445 genes targeted by the enriched gRNAs were prioritized for further analysis based on several criteria, including whether the gene was targeted by more than one gRNA, and degree of enrichment of the gene-targeting gRNA based on the above-described sequencing analysis. Table E2 shows the 27 prioritized genes with exemplary gene-targeting gRNAs.

TABLE E2
Prioritized genes and exemplary targeting gRNAs

| | Exemplary gene- | | Target site |
|---|---|---|---|
| Target | targeting gRNA | | SEQ ID |
| gene | name | gRNA target site | NO: |
| BMP4 | BMP4_a | GACAGCCGGCGAGCAGGGG | 1 |
| E2F7 | E2F7_a | TTAGCGGGGACTACGATCC | 2 |
| ESRRG | ESRRG_a | TGGAGCCCGCCGCCTCCAG | 3 |
| LYL1 | LYL1_a | GTTTCCTCCCTCTCACCCC | 4 |
| STAT5A | STAT5A_a | CCGCGGTCCAGGGATAGGT | 5 |
| THAP10 | THAP10_a | CTTCCGGTGACCAGAGGTA | 6 |
| ZNF362 | ZNF362_a | GGGTAGGAAGTGTCTCCCG | 7 |
| ZSCAN1 | ZSCAN1_a | CCGCGCGCGGGCTTCGCTC | 8 |
| ANHX | ANHX_a | CGGAAGGTGAGGGGCGCTA | 9 |
| CPEB1 | CPEB1_a | CAACATCGTCTTCCATGTC | 10 |
| CSRNP1 | CSRNP1_a | TCTGCGCGTCCGGCAGCGG | 11 |
| EN2 | EN2_a | CTCCGTGTGCGCCGCGGGA | 12 |
| EPAS1 | EPAS1_a | CGCCCCAGCGCTCCTGAGG | 13 |
| IRX3 | IRX3_a | AAGCAGCGGAAGCGATCCT | 14 |
| LHX8 | LHX8_a | CGAGCTACCAGCGCTCGGG | 15 |
| NR5A2 | NR5A2_a | AGCATGACAAGGCGACCGC | 16 |
| PRDM16 | PRDM16_a | ACCATGCGATCCAAGGCGA | 17 |
| RAX2 | RAX2_a | CCGGAGCCGAGCCAGGTCG | 18 |
| SCML4 | SCML4_a | TGTGAGCTACTAACACGGG | 19 |
| SMAD1 | SMAD1_a | GCTCCTCCGAGCAGACGGG | 20 |
| SOX6 | SOX6_a | TCTAGCCAGCCCCTAAGTC | 21 |
| SUV39H1 | SUV39H1_a | TCTTCTCGCGAGGCCGGCT | 22 |
| TFDP1 | TFDP1_a | TCCCGGCGCCACTCGGCCC | 23 |
| ZNF287 | ZNF287_a | CAGAGGCGCCGGGGTTTCT | 24 |
| ZNF438 | ZNF438_a | GTCACGGGCCCAGCAGTCG | 25 |
| ZNF681 | ZNF681_a | AGGAGAAAGGACGCCCGGG | 26 |
| ZNF853 | ZNF853_a | CCTCTGCGCTAGGGAGGTG | 27 |

C. Complementary CRISPR-Based Transcriptional Activation (CRISPRa) Screen to Identify Genes that Negatively Regulate a CCR7+/CD27+T_{SCM} Cell-Like Phenotype

[0602] A complementary CRISPR-based transcriptional activation (CRISPRa) screen was performed in which the gRNA library was screened in primary T cells expressing dSpCas9-VP64 (SEQ ID NO: 1456), an exemplary DNA-targeting fusion protein for transcriptional activation of gRNA-targeted genes (as opposed to repression by dSpCas9-KRAB). gRNAs were identified that were depleted from the CCR7+/CD27+ population in comparison to the unsorted population. Activation of the genes targeted by the enriched gRNAs would be expected to inhibit the assessed T_{SCM} cell-like phenotype. 38 of these genes identified in the CRISPRa screen overlapped with genes identified in the CRISPRi screen, as described above. The results from the complementary CRISPRa and CRISPRi screens suggest that the 38 overlapping genes both promote the CCR7+/CD27+T_{SCM} cell-like phenotype when repressed and inhibit the CCR7+/CD27+T_{SCM} cell-like phenotype when activated. These 38 genes are therefore highly likely to negatively regulate the T_{SCM} cell-like phenotype. In addition, 8 of these 38 genes also overlapped with genes from the prioritized group of genes (as shown in Table E2) from the CRISPRi screen. Table E3 shows these 8 “CRISPRa/CRISPRi overlap” genes with exemplary repressing gene-targeting gRNAs.

TABLE E3
CRISPRa/CRISPRi overlap genes and exemplary targeting gRNAs

| | Exemplary gene- | | Target site |
|---|---|---|---|
| Target | targeting gRNA | | SEQ ID |
| gene | name | gRNA target site | NO: |
| BMP4 | BMP4_a | GACAGCCGGCGAGCAGGGG | 1 |
| E2F7 | E2F7_a | TTAGCGGGGACTACGATCC | 2 |
| ESRRG | ESRRG_a | TGGAGCCCGCCGCCTCCAG | 3 |
| LYL1 | LYL1_a | GTTTCCTCCCTCTCACCCC | 4 |
| STAT5A | STAT5A_a | CCGCGGTCCAGGGATAGGT | 5 |
| THAP10 | THAP10_a | CTTCCGGTGACCAGAGGTA | 6 |
| ZNF362 | ZNF362_a | GGGTAGGAAGTGTCTCCCG | 7 |
| ZSCAN1 | ZSCAN1_a | CCGCGCGCGGGCTTCGCTC | 8 |

[0603] In summary, the results show that gene-targeting gRNAs, along with an exemplary Cas9 fusion protein with transcriptional repression activity, can facilitate enrichment of CCR7+/CD27+T_{SCM} cell-like phenotypes in primary T cells. The results support the utility of the identified gRNAs and modulation of the targeted genes for modifying T cell phenotypes, which may be advantageous for adoptive cell therapy.

[0604] The present invention is not intended to be limited in scope to the particular disclosed embodiments, which are provided, for example, to illustrate various aspects of the invention. Various modifications to the compositions and methods described will become apparent from the description and teachings herein. Such variations may be practiced without departing from the true scope and spirit of the disclosure and are intended to fall within the scope of the present disclosure.

Sequences

| SEQ ID | | Anno- |
|---|---|---|
| NO. | Sequence | tation |
| 1453 | GTTTAAGAGCTATGCTGGAAACAGCATAGCAAGTTTAAATAAGGCTAGTCCGTTATCAACTTGAAA | SpCas9 |
| | AAGTGGCACCGAGTCGGTGC | gRNA |
| | | scaffold |
| | | sequence |
| | | (DNA) |
| 1454 | GUUUAAGAGCUAUGCUGGAAACAGCAUAGCAAGUUUAAAUAAGGCUAGUCCGUUAUCAACUU | SpCas9 |
| | GAAAAAGUGGCACCGAGUCGGUGC | gRNA |
| | | scaffold |
| | | sequence |
| | | (RNA) |
| 1455 | gacgcattggacgattttgatctggatatgctgggaagtgacgccctcgatgattttgaccttgacatgcttgg | VP64- |
| | ttcggatgcccttgatgactttgacctcgacatgctcggcagtgacgcccttgatgatttcgacctggacatgG | dSpCas9- |
| | TTAACCCAAAGAAGAAGCGGAAGGTCGGTATCCACGGAGTCCCAGCAGCCGACAAGAAGTACTCCATTGGGCTC | NLS- |
| | GCCATCGGCACAAACAGCGTCGGCTGGGCCGTCATTACGGACGAGTACAAGGTGCCGAGCAAAAAATTCAAAGT | VP64 |
| | TCTGGGCAATACCGATCGCCACAGCATAAAGAAGAACCTCATTGGCGCCCTCCTGTTCGACTCCGGGGAA | (nt) |
| | ACCGCCGAAGCCACGCGGCTCAAAAGAACAGCACGGCGCAGATATACCCGCAGAAAGAATCGGAT | |
| | CTGCTACCtgcaGGAGATCTTTAGTAATGAGATGGCTAAGGTGGATGACTCTTTCTTCCATAGGCTGG | |
| | AGGAGTCCTTTTTGGTGGAGGAGGATAAAAAGCACGAGCGCCACCCAATCTTTGGCAATATCGTGG | |
| | ACGAGGTGGCGTACCATGAAAAGTACCCAACCATATATCATCTGAGGAAGAAGCTTGTAGACAGTA | |
| | CTGATAAGGCTGACTTGCGGTTGATCTATCTCGCGCTGGCGCATATGATCAAATTTCGGGGACACTT | |
| | CCTCATCGAGGGGGACCTGAACCCAGACAACAGCGATGTCGACAAACTCTTTATCCAACTGGTTCA | |
| | GACTTACAATCAGCTTTTCGAAGAGAACCCGATCAACGCATCCGGAGTTGACGCCAAAGCAATCCT | |
| | GAGCGCTAGGCTGTCCAAATCCCGGCGGCTCGAAAACCTCATCGCACAGCTCCCTGGGGAGAAGA | |
| | AGAACGGCCTGTTTGGTAATCTTATCGCCCTGTCACTCGGGCTGACCCCCAACTTTAAATCTAACTTC | |
| | GACCTGGCCGAAGATGCCAAGCTTCAACTGAGCAAAGACACCTACGATGATGATCTCGACAATCTG | |
| | CTGGCCCAGATCGGCGACCAGTACGCAGACCTTTTTTTGGCGGCAAAGAACCTGTCAGACGCCATT | |
| | CTGCTGAGTGATATTCTGCGAGTGAACACGGAGATCACCAAAGCTCCGCTGAGCGCTAGTATGATC | |
| | AAGCGCTATGATGAGCACCACCAAGACTTGACTTTGCTGAAGGCCCTTGTCAGACAGCAACTGCCT | |
| | GAGAAGTACAAGGAAATTTTCTTCGATCAGTCTAAAAATGGCTACGCCGGATACATTGACGGCGGA | |
| | GCAAGCCAGGAGGAATTTTACAAATTTATTAAGCCCATCTTGGAAAAAATGGACGGCACCGAGGAG | |
| | CTGCTGGTAAAGCTTAACAGAGAAGATCTGTTGCGCAAACAGCGCACTTTCGACAATGGAAGCATC | |
| | CCCCACCAGATTCACCTGGGCGAACTGCACGCTATCCTCAGGCGGCAAGAGGATTTCTACCCCTTTT | |
| | TGAAAGATAACAGGGAAAAGATTGAGAAAATCCTCACATTTCGGATACCCTACTATGTAGGCCCCC | |
| | TCGCCCGGGGAAATTCCAGATTCGCGTGGATGACTCGCAAATCAGAAGAGACCATCACTCCCTGGA | |
| | ACTTCGAGGAAGTCGTGGATAAGGGGGCCTCTGCCCAGTCCTTCATCGAAAGGATGACTAACTTTG | |
| | ATAAAAATCTGCCTAACGAAAAGGTGCTTCCTAAACACTCTCTGCTGTACGAGTACTTCACAGTTTAT | |
| | AACGAGCTCACCAAGGTCAAATACGTCACAGAAGGGATGAGAAAGCCAGCATTCCTGTCTGGAGA | |
| | GCAGAAGAAAGCTATCGTGGACCTCCTCTTCAAGACGAACCGGAAAGTTACCGTGAAACAGCTCAA | |
| | AGAAGACTATTTCAAAAAGATTGAATGTTTCGACTCTGTTGAAATCAGCGGAGTGGAGGATCGCTT | |
| | CAACGCATCCCTGGGAACGTATCACGATCTCCTGAAAATCATTAAAGACAAGGACTTCCTGGACAAT | |
| | GAGGAGAACGAGGACATTCTTGAGGACATTGTCCTCACCCTTACGTTGTTTGAAGATAGGGAGATG | |
| | ATTGAAGAACGCTTGAAAACTTACGCTCATCTCTTCGACGACAAAGTCATGAAACAGCTCAAGAGG | |
| | CGCCGATATACAGGATGGGGGCGGCTGTCAAGAAAACTGATCAATGGgatcCGAGACAAGCAGAGT | |
| | GGAAAGACAATCCTGGATTTTCTTAAGTCCGATGGATTTGCCAACCGGAACTTCATGCAGTTGATCC | |
| | ATGATGACTCTCTCACCTTTAAGGAGGACATCCAGAAAGCACAAGTTTCTGGCCAGGGGGACAGTC | |
| | TTCACGAGCACATCGCTAATCTTGCAGGTAGCCCAGCTATCAAAAAGGGAATACTGCAGACCGTTA | |
| | AGGTCGTGGATGAACTCGTCAAAGTAATGGGAAGGCATAAGCCCGAGAATATCGTTATCGAGATG | |
| | GCCCGAGAGAACCAAACTACCCAGAAGGGACAGAAGAACAGTAGGGAAAGGATGAAGAGGATTG | |
| | AAGAGGGTATAAAAGAACTGGGGTCCCAAATCCTTAAGGAACACCCAGTTGAAAACACCCAGCTTC | |
| | AGAATGAGAAGCTCTACCTGTACTACCTGCAGAACGGCAGGGACATGTACGTGGATCAGGAACTG | |
| | GACATCAATCGGCTCTCCGACTACGACGTGGATGCCATCGTGCCCCAGTCTTTTCTCAAAGATGATT | |
| | CTATTGATAATAAAGTGTTGACAAGATCCGATAAAAATAGAGGGAAGAGTGATAACGTCCCCTCAG | |
| | AAGAAGTTGTCAAGAAAATGAAAAATTATTGGCGGCAGCTGCTGAACGCCAAACTGATCACACAAC | |
| | GGAAGTTCGATAATCTGACTAAGGCTGAACGAGGTGGCCTGTCTGAGTTGGATAAAGCCGGCTTCA | |
| | TCAAAAGGCAGCTTGTTGAGACACGCCAGATCACCAAgcacGTGGCCCAAATTCTCGATTCACGCAT | |
| | GAACACCAAGTACGATGAAAATGACAAACTGATTCGAGAGGTGAAAGTTATTACTCTGAAGTCTAA | |
| | GCTGGTCTCAGATTTCAGAAAGGACTTTCAGTTTTATAAGGTGAGAGAGATCAACAATTACCACCAT | |
| | GCGCATGATGCCTACCTGAATGCAGTGGTAGGCACTGCACTTATCAAAAAATATCCCAAGCTTGAAT | |
| | CTGAATTTGTTTACGGAGACTATAAAGTGTACGATGTTAGGAAAATGATCGCAAAGTCTGAGCAGG | |
| | AAATAGGCAAGGCCACCGCTAAGTACTTCTTTTACAGCAATATTATGAATTTTTTCAAGACCGAGAT | |
| | TACACTGGCCAATGGAGAGATTCGGAAGCGACCACTTATCGAAACAAACGGAGAAACAGGAGAAA | |
| | TCGTGTGGGACAAGGGTAGGGATTTCGCGACAGTCCGGAAGGTCCTGTCCATGCCGCAGGTGAAC | |
| | ATCGTTAAAAAGACCGAAGTACAGACCGGAGGCTTCTCCAAGGAAAGTATCCTCCCGAAAAGGAAC | |
| | AGCGACAAGCTGATCGCACGCAAAAAAGATTGGGACCCCAAGAAATACGGCGGATTCGATTCTCCT | |
| | ACAGTCGCTTACAGTGTACTGGTTGTGGCCAAAGTGGAGAAAGGGAAGTCTAAAAAACTCAAAAG | |
| | CGTCAAGGAACTGCTGGGCATCACAATCATGGAGCGATCAAGCTTCGAAAAAAACCCCATCGACTT | |
| | TCTCGAGGCGAAAGGATATAAAGAGGTCAAAAAAGACCTCATCATTAAGCTTCCCAAGTACTCTCTC | |
| | TTTGAGCTTGAAAACGGCCGGAAACGAATGCTCGCTAGTGCGGGCGAGCTGCAGAAAGGTAACGA | |
| | GCTGGCACTGCCCTCTAAATACGTTAATTTCTTGTATCTGGCCAGCCACTATGAAAAGCTCAAAGGG | |
| | TCTCCCGAAGATAATGAGCAGAAGCAGCTGTTCGTGGAACAACACAAACACTACCTTGATGAGATC | |
| | ATCGAGCAAATAAGCGAATTCTCCAAAAGAGTGATCCTCGCCGACGCTAACCTCGATAAGGTGCTTT | |
| | CTGCTTACAATAAGCACAGGGATAAGCCCATCAGGGAGCAGGCAGAAAACATTATCCACTTGTTTA | |
| | CTCTGACCAACTTGGGCGCGCCTGCAGCCTTCAAGTACTTCGACACCACCATAGACAGAAAGCGGT | |
| | ACACCTCTACAAAGGAGGTCCTGGACGCCACACTGATTCATCAGTCAATTACGGGGCTCTATGAAAC | |
| | AAGAATCGACCTCTCTCAGCTCGGTGGAGACAAAAGGCCGGCGGCCACGAAAAAGGCCGGCCAGG | |
| | CAAAAAAGAAAAAGGctagCcgcgccgacgcgctggacgatttcgatctcgacatgctgggttctgatgccct | |
| | cgatgactttgacctggatatgttgggaagcgacgcattggatgactttgatctggacatgctcggctccga | |
| | tgctctggacgatttcgatctcgatatgtta | |
| 1456 | DALDDFDLDMLGSDALDDFDLDMLGSDALDDFDLDMLGSDALDDFDLDMVNPKKKRKVGIHGVPAA | VP64- |
| | DKKYSIGLAIGTNSVGWAVITDEYKVPSKKFKVLGNTDRHSIKKNLIGALLFDSGETAEATRLKRTARRRYT | dSpCas9 |
| | RRKNRICYLQEIFSNEMAKVDDSFFHRLEESFLVEEDKKHERHPIFGNIVDEVAYHEKYPTIYHLRKKLVDS | NLS- |
| | TDKADLRLIYLALAHMIKFRGHFLIEGDLNPDNSDVDKLFIQLVQTYNQLFEENPINASGVDAKAILSARLS | VP64 |
| | KSRRLENLIAQLPGEKKNGLFGNLIALSLGLTPNFKSNFDLAEDAKLQLSKDTYDDDLDNLLAQIGDQYAD | (AA) |
| | LFLAAKNLSDAILLSDILRVNTEITKAPLSASMIKRYDEHHQDLTLLKALVRQQLPEKYKEIFFDQSKNGYA | |
| | GYIDGGASQEEFYKFIKPILEKMDGTEELLVKLNREDLLRKQRTFDNGSIPHQIHLGELHAILRRQEDFYPF | |
| | LKDNREKIEKILTFRIPYYVGPLARGNSRFAWMTRKSEETITPWNFEEVVDKGASAQSFIERMTNFDKNL | |
| | PNEKVLPKHSLLYEYFTVYNELTKVKYVTEGMRKPAFLSGEQKKAIVDLLFKTNRKVTVKQLKEDYFKKIEC | |
| | FDSVEISGVEDRFNASLGTYHDLLKIIKDKDFLDNEENEDILEDIVLTLTLFEDREMIEERLKTYAHLFDDKV | |
| | MKQLKRRRYTGWGRLSRKLINGIRDKQSGKTILDFLKSDGFANRNFMQLIHDDSLTFKEDIQKAQVSGQ | |
| | GDSLHEHIANLAGSPAIKKGILQTVKVVDELVKVMGRHKPENIVIEMARENQTTQKGQKNSRERMKRIE | |
| | EGIKELGSQILKEHPVENTQLQNEKLYLYYLQNGRDMYVDQELDINRLSDYDVDAIVPQSFLKDDSIDNK | |
| | VLTRSDKNRGKSDNVPSEEVVKKMKNYWRQLLNAKLITQRKFDNLTKAERGGLSELDKAGFIKRQLVET | |
| | RQITKHVAQILDSRMNTKYDENDKLIREVKVITLKSKLVSDFRKDFQFYKVREINNYHHAHDAYLNAVVG | |
| | TALIKKYPKLESEFVYGDYKVYDVRKMIAKSEQEIGKATAKYFFYSNIMNFFKTEITLANGEIRKRPLIETNG | |
| | ETGEIVWDKGRDFATVRKVLSMPQVNIVKKTEVQTGGFSKESILPKRNSDKLIARKKDWDPKKYGGFDS | |
| | PTVAYSVLVVAKVEKGKSKKLKSVKELLGITIMERSSFEKNPIDFLEAKGYKEVKKDLIIKLPKYSLFELENGR | |
| | KRMLASAGELQKGNELALPSKYVNFLYLASHYEKLKGSPEDNEQKQLFVEQHKHYLDEIIEQISEFSKRVIL | |
| | ADANLDKVLSAYNKHRDKPIREQAENIIHLFTLTNLGAPAAFKYFDTTIDRKRYTSTKEVLDATLIHQSITGL | |
| | YETRIDLSQLGGDKRPAATKKAGQAKKKKASRADALDDFDLDMLGSDALDDFDLDMLGSDALDDFDLD | |
| | MLGSDALDDFDLDML | |
| 1457 | CCAAAGAAGAAGCGGAAGGTCGGTATCCACGGAGTCCCAGCAGCCGACAAGAAGTACTCCATTGG | NLS2- |
| | GCTCGCCATCGGCACAAACAGCGTCGGCTGGGCCGTCATTACGGACGAGTACAAGGTGCCGAGCA | dSpCas9- |
| | AAAAATTCAAAGTTCTGGGCAATACCGATCGCCACAGCATAAAGAAGAACCTCATTGGCGCCCTCCT | NLS- |
| | GTTCGACTCCGGGGAAACCGCCGAAGCCACGCGGCTCAAAAGAACAGCACGGCGCAGATATACCC | KRAB- |
| | GCAGAAAGAATCGGATCTGCTACCtgcaGGAGATCTTTAGTAATGAGATGGCTAAGGTGGATGACTC | NLS2 |
| | TTTCTTCCATAGGCTGGAGGAGTCCTTTTTGGTGGAGGAGGATAAAAAGCACGAGCGCCACCCAAT | (nt) |
| | CTTTGGCAATATCGTGGACGAGGTGGCGTACCATGAAAAGTACCCAACCATATATCATCTGAGGAA | |
| | GAAGCTTGTAGACAGTACTGATAAGGCTGACTTGCGGTTGATCTATCTCGCGCTGGCGCATATGATC | |
| | AAATTTCGGGGACACTTCCTCATCGAGGGGGACCTGAACCCAGACAACAGCGATGTCGACAAACTC | |
| | TTTATCCAACTGGTTCAGACTTACAATCAGCTTTTCGAAGAGAACCCGATCAACGCATCCGGAGTTG | |
| | ACGCCAAAGCAATCCTGAGCGCTAGGCTGTCCAAATCCCGGCGGCTCGAAAACCTCATCGCACAGC | |
| | TCCCTGGGGAGAAGAAGAACGGCCTGTTTGGTAATCTTATCGCCCTGTCACTCGGGCTGACCCCCA | |
| | ACTTTAAATCTAACTTCGACCTGGCCGAAGATGCCAAGCTTCAACTGAGCAAAGACACCTACGATGA | |
| | TGATCTCGACAATCTGCTGGCCCAGATCGGCGACCAGTACGCAGACCTTTTTTTGGCGGCAAAGAA | |
| | CCTGTCAGACGCCATTCTGCTGAGTGATATTCTGCGAGTGAACACGGAGATCACCAAAGCTCCGCT | |
| | GAGCGCTAGTATGATCAAGCGCTATGATGAGCACCACCAAGACTTGACTTTGCTGAAGGCCCTTGT | |
| | CAGACAGCAACTGCCTGAGAAGTACAAGGAAATTTTCTTCGATCAGTCTAAAAATGGCTACGCCGG | |
| | ATACATTGACGGCGGAGCAAGCCAGGAGGAATTTTACAAATTTATTAAGCCCATCTTGGAAAAAAT | |
| | GGACGGCACCGAGGAGCTGCTGGTAAAGCTTAACAGAGAAGATCTGTTGCGCAAACAGCGCACTT | |
| | TCGACAATGGAAGCATCCCCCACCAGATTCACCTGGGCGAACTGCACGCTATCCTCAGGCGGCAAG | |
| | AGGATTTCTACCCCTTTTTGAAAGATAACAGGGAAAAGATTGAGAAAATCCTCACATTTCGGATACC | |
| | CTACTATGTAGGCCCCCTCGCCCGGGGAAATTCCAGATTCGCGTGGATGACTCGCAAATCAGAAGA | |
| | GACCATCACTCCCTGGAACTTCGAGGAAGTCGTGGATAAGGGGGCCTCTGCCCAGTCCTTCATCGA | |
| | AAGGATGACTAACTTTGATAAAAATCTGCCTAACGAAAAGGTGCTTCCTAAACACTCTCTGCTGTAC | |
| | GAGTACTTCACAGTTTATAACGAGCTCACCAAGGTCAAATACGTCACAGAAGGGATGAGAAAGCCA | |
| | GCATTCCTGTCTGGAGAGCAGAAGAAAGCTATCGTGGACCTCCTCTTCAAGACGAACCGGAAAGTT | |
| | ACCGTGAAACAGCTCAAAGAAGACTATTTCAAAAAGATTGAATGTTTCGACTCTGTTGAAATCAGCG | |
| | GAGTGGAGGATCGCTTCAACGCATCCCTGGGAACGTATCACGATCTCCTGAAAATCATTAAAGACA | |
| | AGGACTTCCTGGACAATGAGGAGAACGAGGACATTCTTGAGGACATTGTCCTCACCCTTACGTTGTT | |
| | TGAAGATAGGGAGATGATTGAAGAACGCTTGAAAACTTACGCTCATCTCTTCGACGACAAAGTCAT | |
| | GAAACAGCTCAAGAGGCGCCGATATACAGGATGGGGGCGGCTGTCAAGAAAACTGATCAATGGga | |
| | tcCGAGACAAGCAGAGTGGAAAGACAATCCTGGATTTTCTTAAGTCCGATGGATTTGCCAACCGGAA | |
| | CTTCATGCAGTTGATCCATGATGACTCTCTCACCTTTAAGGAGGACATCCAGAAAGCACAAGTTTCT | |
| | GGCCAGGGGGACAGTCTTCACGAGCACATCGCTAATCTTGCAGGTAGCCCAGCTATCAAAAAGGG | |
| | AATACTGCAGACCGTTAAGGTCGTGGATGAACTCGTCAAAGTAATGGGAAGGCATAAGCCCGAGA | |
| | ATATCGTTATCGAGATGGCCCGAGAGAACCAAACTACCCAGAAGGGACAGAAGAACAGTAGGGAA | |
| | AGGATGAAGAGGATTGAAGAGGGTATAAAAGAACTGGGGTCCCAAATCCTTAAGGAACACCCAGT | |
| | TGAAAACACCCAGCTTCAGAATGAGAAGCTCTACCTGTACTACCTGCAGAACGGCAGGGACATGTA | |
| | CGTGGATCAGGAACTGGACATCAATCGGCTCTCCGACTACGACGTGGATGCCATCGTGCCCCAGTC | |
| | TTTTCTCAAAGATGATTCTATTGATAATAAAGTGTTGACAAGATCCGATAAAAATAGAGGGAAGAG | |
| | TGATAACGTCCCCTCAGAAGAAGTTGTCAAGAAAATGAAAAATTATTGGCGGCAGCTGCTGAACGC | |
| | CAAACTGATCACACAACGGAAGTTCGATAATCTGACTAAGGCTGAACGAGGTGGCCTGTCTGAGTT | |
| | GGATAAAGCCGGCTTCATCAAAAGGCAGCTTGTTGAGACACGCCAGATCACCAAgcacGTGGCCCA | |
| | AATTCTCGATTCACGCATGAACACCAAGTACGATGAAAATGACAAACTGATTCGAGAGGTGAAAGT | |
| | TATTACTCTGAAGTCTAAGCTGGTCTCAGATTTCAGAAAGGACTTTCAGTTTTATAAGGTGAGAGAG | |
| | ATCAACAATTACCACCATGCGCATGATGCCTACCTGAATGCAGTGGTAGGCACTGCACTTATCAAAA | |
| | AATATCCCAAGCTTGAATCTGAATTTGTTTACGGAGACTATAAAGTGTACGATGTTAGGAAAATGAT | |
| | CGCAAAGTCTGAGCAGGAAATAGGCAAGGCCACCGCTAAGTACTTCTTTTACAGCAATATTATGAA | |
| | TTTTTTCAAGACCGAGATTACACTGGCCAATGGAGAGATTCGGAAGCGACCACTTATCGAAACAAA | |
| | CGGAGAAACAGGAGAAATCGTGTGGGACAAGGGTAGGGATTTCGCGACAGTCCGGAAGGTCCTG | |
| | TCCATGCCGCAGGTGAACATCGTTAAAAAGACCGAAGTACAGACCGGAGGCTTCTCCAAGGAAAGT | |
| | ATCCTCCCGAAAAGGAACAGCGACAAGCTGATCGCACGCAAAAAAGATTGGGACCCCAAGAAATA | |
| | CGGCGGATTCGATTCTCCTACAGTCGCTTACAGTGTACTGGTTGTGGCCAAAGTGGAGAAAGGGAA | |
| | GTCTAAAAAACTCAAAAGCGTCAAGGAACTGCTGGGCATCACAATCATGGAGCGATCAAGCTTCGA | |
| | AAAAAACCCCATCGACTTTCTCGAGGCGAAAGGATATAAAGAGGTCAAAAAAGACCTCATCATTAA | |
| | GCTTCCCAAGTACTCTCTCTTTGAGCTTGAAAACGGCCGGAAACGAATGCTCGCTAGTGCGGGCGA | |
| | GCTGCAGAAAGGTAACGAGCTGGCACTGCCCTCTAAATACGTTAATTTCTTGTATCTGGCCAGCCAC | |
| | TATGAAAAGCTCAAAGGGTCTCCCGAAGATAATGAGCAGAAGCAGCTGTTCGTGGAACAACACAA | |
| | ACACTACCTTGATGAGATCATCGAGCAAATAAGCGAATTCTCCAAAAGAGTGATCCTCGCCGACGCT | |
| | AACCTCGATAAGGTGCTTTCTGCTTACAATAAGCACAGGGATAAGCCCATCAGGGAGCAGGCAGAA | |
| | AACATTATCCACTTGTTTACTCTGACCAACTTGGGCGCGCCTGCAGCCTTCAAGTACTTCGACACCAC | |
| | CATAGACAGAAAGCGGTACACCTCTACAAAGGAGGTCCTGGACGCCACACTGATTCATCAGTCAAT | |
| | TACGGGGCTCTATGAAACAAGAATCGACCTCTCTCAGCTCGGTGGAGACAAAAGGCCGGCGGCCA | |
| | CGAAAAAGGCCGGCCAGGCAAAAAAGAAAAAGGctagCgatgctaagtcactgactgcctggtcccggacactg | |
| | gtgaccttcaaggatgtgtttgtggacttcaccagggaggagtggaagctgctggacactgctcagcagatcc | |
| | tgtacagaaatgtgatgctggagaactataagaacctggtttccttgggttatcagcttactaagccagatgt | |
| | gatcctccggttggagaagggagaagagccctggctggtggagagagaaattcaccaagagacccatcctgatt | |
| | cagagactgcatttgaaatcaaatcatcagttCCGAAAAAGAAACGCAAAGTT | |
| 1458 | PKKKRKVGIHGVPAADKKYSIGLAIGTNSVGWAVITDEYKVPSKKFKVLGNTDRHSIKKNLIGALLFDSGE | NLS2- |
| | TAEATRLKRTARRRYTRRKNRICYLQEIFSNEMAKVDDSFFHRLEESFLVEEDKKHERHPIFGNIVDEVAY | dSpCas9- |
| | HEKYPTIYHLRKKLVDSTDKADLRLIYLALAHMIKFRGHFLIEGDLNPDNSDVDKLFIQLVQTYNQLFEENP | NLS- |
| | INASGVDAKAILSARLSKSRRLENLIAQLPGEKKNGLFGNLIALSLGLTPNFKSNFDLAEDAKLQLSKDTYD | KRAB- |
| | DDLDNLLAQIGDQYADLFLAAKNLSDAILLSDILRVNTEITKAPLSASMIKRYDEHHQDLTLLKALVRQQLP | NLS2 |
| | EKYKEIFFDQSKNGYAGYIDGGASQEEFYKFIKPILEKMDGTEELLVKLNREDLLRKQRTFDNGSIPHQIHL | (AA) |
| | GELHAILRRQEDFYPFLKDNREKIEKILTFRIPYYVGPLARGNSRFAWMTRKSEETITPWNFEEVVDKGAS | |
| | AQSFIERMTNFDKNLPNEKVLPKHSLLYEYFTVYNELTKVKYVTEGMRKPAFLSGEQKKAIVDLLFKTNRK | |
| | VTVKQLKEDYFKKIECFDSVEISGVEDRFNASLGTYHDLLKIIKDKDFLDNEENEDILEDIVLTLTLFEDREMI | |
| | EERLKTYAHLFDDKVMKQLKRRRYTGWGRLSRKLINGIRDKQSGKTILDFLKSDGFANRNFMQLIHDDSL | |
| | TFKEDIQKAQVSGQGDSLHEHIANLAGSPAIKKGILQTVKVVDELVKVMGRHKPENIVIEMARENQTTQ | |
| | KGQKNSRERMKRIEEGIKELGSQILKEHPVENTQLQNEKLYLYYLQNGRDMYVDQELDINRLSDYDVDAI | |
| | VPQSFLKDDSIDNKVLTRSDKNRGKSDNVPSEEVVKKMKNYWRQLLNAKLITQRKFDNLTKAERGGLSE | |
| | LDKAGFIKRQLVETRQITKHVAQILDSRMNTKYDENDKLIREVKVITLKSKLVSDFRKDFQFYKVREINNYH | |
| | HAHDAYLNAVVGTALIKKYPKLESEFVYGDYKVYDVRKMIAKSEQEIGKATAKYFFYSNIMNFFKTEITLA | |
| | NGEIRKRPLIETNGETGEIVWDKGRDFATVRKVLSMPQVNIVKKTEVQTGGFSKESILPKRNSDKLIARKK | |
| | DWDPKKYGGFDSPTVAYSVLVVAKVEKGKSKKLKSVKELLGITIMERSSFEKNPIDFLEAKGYKEVKKDLII | |
| | KLPKYSLFELENGRKRMLASAGELQKGNELALPSKYVNFLYLASHYEKLKGSPEDNEQKQLFVEQHKHYL | |
| | DEIIEQISEFSKRVILADANLDKVLSAYNKHRDKPIREQAENIIHLFTLTNLGAPAAFKYFDTTIDRKRYTSTK | |
| | EVLDATLIHQSITGLYETRIDLSQLGGDKRPAATKKAGQAKKKKASDAKSLTAWSRTLVTFKDVFVDFTRE | |
| | EWKLLDTAQQILYRNVMLENYKNLVSLGYQLTKPDVILRLEKGEEPWLVEREIHQETHPDSETAFEIKSSV | |
| | PKKKRKV | |
| 1459 | NGG | S. |
| | | pyogenes |
| | | Cas9 |
| | | proto- |
| | | spacer |
| | | adjacent |
| | | motif |
| 1460 | NNGRRT | S. aureus |
| | | Cas9 |
| | | proto- |
| | | spacer |
| | | adjacent |
| | | motif |
| 1461 | MKRNYILGLDIGITSVGYGIIDYETRDVIDAGVRLFKEANVENNEGRRSKRGARRLKRRRRHRIQRVKKLL | SaCas9 |
| | FDYNLLTDHSELSGINPYEARVKGLSQKLSEEEFSAALLHLAKRRGVHNVNEVEEDTGNELSTKEQISRNS | (AA) |
| | KALEEKYVAELQLERLKKDGEVRGSINRFKTSDYVKEAKQLLKVQKAYHQLDQSFIDTYIDLLETRRTYYEG | |
| | PGEGSPFGWKDIKEWYEMLMGHCTYFPEELRSVKYAYNADLYNALNDLNNLVITRDENEKLEYYEKFQII | |
| | ENVFKQKKKPTLKQIAKEILVNEEDIKGYRVTSTGKPEFTNLKVYHDIKDITARKEIIENAELLDQIAKILTIYQ | |
| | SSEDIQEELTNLNSELTQEEIEQISNLKGYTGTHNLSLKAINLILDELWHTNDNQIAIFNRLKLVPKKVDLSQ | |
| | QKEIPTTLVDDFILSPVVKRSFIQSIKVINAIIKKYGLPNDIIIELAREKNSKDAQKMINEMQKRNRQTNERIE | |
| | EIIRTTGKENAKYLIEKIKLHDMQEGKCLYSLEAIPLEDLLNNPFNYEVDHIIPRSVSFDNSFNNKVLVKQEE | |
| | NSKKGNRTPFQYLSSSDSKISYETFKKHILNLAKGKGRISKTKKEYLLEERDINRFSVQKDFINRNLVDTRYA | |
| | TRGLMNLLRSYFRVNNLDVKVKSINGGFTSFLRRKWKFKKERNKGYKHHAEDALIIANADFIFKEWKKLD | |
| | KAKKVMENQMFEEKQAESMPEIETEQEYKEIFITPHQIKHIKDFKDYKYSHRVDKKPNRELINDTLYSTRK | |
| | DDKGNTLIVNNLNGLYDKDNDKLKKLINKSPEKLLMYHHDPQTYQKLKLIMEQYGDEKNPLYKYYEETG | |
| | NYLTKYSKKDNGPVIKKIKYYGNKLNAHLDITDDYPNSRNKVVKLSLKPYRFDVYLDNGVYKFVTVKNLDV | |
| | IKKENYYEVNSKCYEEAKKLKKISNQAEFIASFYNNDLIKINGELYRVIGVNNDLLNRIEVNMIDITYREYLE | |
| | NMNDKRPPRIIKTIASKTQSIKKYSTDILGNLYEVKSKKHPQIIKKG | |
| 1462 | KRNYILGLAIGITSVGYGIIDYETRDVIDAGVRLFKEANVENNEGRRSKRGARRLKRRRRHRIQRVKKLLFD | dSaCas9 |
| | YNLLTDHSELSGINPYEARVKGLSQKLSEEEFSAALLHLAKRRGVHNVNEVEEDTGNELSTKEQISRNSKA | (AA) |
| | LEEKYVAELQLERLKKDGEVRGSINRFKTSDYVKEAKQLLKVQKAYHQLDQSFIDTYIDLLETRRTYYEGPG | |
| | EGSPFGWKDIKEWYEMLMGHCTYFPEELRSVKYAYNADLYNALNDLNNLVITRDENEKLEYYEKFQIIEN | |
| | VFKQKKKPTLKQIAKEILVNEEDIKGYRVTSTGKPEFTNLKVYHDIKDITARKEIIENAELLDQIAKILTIYQSS | |
| | EDIQEELTNLNSELTQEEIEQISNLKGYTGTHNLSLKAINLILDELWHTNDNQIAIFNRLKLVPKKVDLSQQ | |
| | KEIPTTLVDDFILSPVVKRSFIQSIKVINAIIKKYGLPNDIIIELAREKNSKDAQKMINEMQKRNRQTNERIEEI | |
| | IRTTGKENAKYLIEKIKLHDMQEGKCLYSLEAIPLEDLLNNPFNYEVDHIIPRSVSFDNSFNNKVLVKQEEAS | |
| | KKGNRTPFQYLSSSDSKISYETFKKHILNLAKGKGRISKTKKEYLLEERDINRFSVQKDFINRNLVDTRYATR | |
| | GLMNLLRSYFRVNNLDVKVKSINGGFTSFLRRKWKFKKERNKGYKHHAEDALIIANADFIFKEWKKLDKA | |
| | KKVMENQMFEEKQAESMPEIETEQEYKEIFITPHQIKHIKDFKDYKYSHRVDKKPNRELINDTLYSTRKDD | |
| | KGNTLIVNNLNGLYDKDNDKLKKLINKSPEKLLMYHHDPQTYQKLKLIMEQYGDEKNPLYKYYEETGNYL | |
| | TKYSKKDNGPVIKKIKYYGNKLNAHLDITDDYPNSRNKVVKLSLKPYRFDVYLDNGVYKFVTVKNLDVIKK | |
| | ENYYEVNSKCYEEAKKLKKISNQAEFIASFYNNDLIKINGELYRVIGVNNDLLNRIEVNMIDITYREYLENM | |
| | NDKRPPRIIKTIASKTQSIKKYSTDILGNLYEVKSKKHPQIIKKG | |
| 1463 | MDKKYSIGLDIGTNSVGWAVITDEYKVPSKKFKVLGNTDRHSIKKNLIGALLFDSGETAEATRLKRTARRR | SpCas9 |
| | YTRRKNRICYLQEIFSNEMAKVDDSFFHRLEESFLVEEDKKHERHPIFGNIVDEVAYHEKYPTIYHLRKKLV | (AA) |
| | DSTDKADLRLIYLALAHMIKFRGHFLIEGDLNPDNSDVDKLFIQLVQTYNQLFEENPINASGVDAKAILSA | |
| | RLSKSRRLENLIAQLPGEKKNGLFGNLIALSLGLTPNFKSNFDLAEDAKLQLSKDTYDDDLDNLLAQIGDQ | |
| | YADLFLAAKNLSDAILLSDILRVNTEITKAPLSASMIKRYDEHHQDLTLLKALVRQQLPEKYKEIFFDQSKNG | |
| | YAGYIDGGASQEEFYKFIKPILEKMDGTEELLVKLNREDLLRKQRTFDNGSIPHQIHLGELHAILRRQEDFY | |
| | PFLKDNREKIEKILTFRIPYYVGPLARGNSRFAWMTRKSEETITPWNFEEVVDKGASAQSFIERMTNFDK | |
| | NLPNEKVLPKHSLLYEYFTVYNELTKVKYVTEGMRKPAFLSGEQKKAIVDLLFKTNRKVTVKQLKEDYFKKI | |
| | ECFDSVEISGVEDRFNASLGTYHDLLKIIKDKDFLDNEENEDILEDIVLTLTLFEDREMIEERLKTYAHLFDDK | |
| | VMKQLKRRRYTGWGRLSRKLINGIRDKQSGKTILDFLKSDGFANRNFMQLIHDDSLTFKEDIQKAQVSG | |
| | QGDSLHEHIANLAGSPAIKKGILQTVKVVDELVKVMGRHKPENIVIEMARENQTTQKGQKNSRERMKRI | |
| | EEGIKELGSQILKEHPVENTQLQNEKLYLYYLQNGRDMYVDQELDINRLSDYDVDHIVPQSFLKDDSIDN | |
| | KVLTRSDKNRGKSDNVPSEEVVKKMKNYWRQLLNAKLITQRKFDNLTKAERGGLSELDKAGFIKRQLVE | |
| | TRQITKHVAQILDSRMNTKYDENDKLIREVKVITLKSKLVSDFRKDFQFYKVREINNYHHAHDAYLNAVV | |
| | GTALIKKYPKLESEFVYGDYKVYDVRKMIAKSEQEIGKATAKYFFYSNIMNFFKTEITLANGEIRKRPLIETN | |
| | GETGEIVWDKGRDFATVRKVLSMPQVNIVKKTEVQTGGFSKESILPKRNSDKLIARKKDWDPKKYGGFD | |
| | SPTVAYSVLVVAKVEKGKSKKLKSVKELLGITIMERSSFEKNPIDFLEAKGYKEVKKDLIIKLPKYSLFELENG | |
| | RKRMLASAGELQKGNELALPSKYVNFLYLASHYEKLKGSPEDNEQKQLFVEQHKHYLDEIIEQISEFSKRVI | |
| | LADANLDKVLSAYNKHRDKPIREQAENIIHLFTLTNLGAPAAFKYFDTTIDRKRYTSTKEVLDATLIHQSITG | |
| | LYETRIDLSQLGGD | |
| 1464 | DKKYSIGLAIGTNSVGWAVITDEYKVPSKKFKVLGNTDRHSIKKNLIGALLFDSGETAEATRLKRTARRRYT | dSpCas9 |
| | RRKNRICYLQEIFSNEMAKVDDSFFHRLEESFLVEEDKKHERHPIFGNIVDEVAYHEKYPTIYHLRKKLVDS | (AA) |
| | TDKADLRLIYLALAHMIKFRGHFLIEGDLNPDNSDVDKLFIQLVQTYNQLFEENPINASGVDAKAILSARLS | |
| | KSRRLENLIAQLPGEKKNGLFGNLIALSLGLTPNFKSNFDLAEDAKLQLSKDTYDDDLDNLLAQIGDQYAD | |
| | LFLAAKNLSDAILLSDILRVNTEITKAPLSASMIKRYDEHHQDLTLLKALVRQQLPEKYKEIFFDQSKNGYA | |
| | GYIDGGASQEEFYKFIKPILEKMDGTEELLVKLNREDLLRKQRTFDNGSIPHQIHLGELHAILRRQEDFYPF | |
| | LKDNREKIEKILTFRIPYYVGPLARGNSRFAWMTRKSEETITPWNFEEVVDKGASAQSFIERMTNFDKNL | |
| | PNEKVLPKHSLLYEYFTVYNELTKVKYVTEGMRKPAFLSGEQKKAIVDLLFKTNRKVTVKQLKEDYFKKIEC | |
| | FDSVEISGVEDRFNASLGTYHDLLKIIKDKDFLDNEENEDILEDIVLTLTLFEDREMIEERLKTYAHLFDDKV | |
| | MKQLKRRRYTGWGRLSRKLINGIRDKQSGKTILDFLKSDGFANRNFMQLIHDDSLTFKEDIQKAQVSGQ | |
| | GDSLHEHIANLAGSPAIKKGILQTVKVVDELVKVMGRHKPENIVIEMARENQTTQKGQKNSRERMKRIE | |
| | EGIKELGSQILKEHPVENTQLQNEKLYLYYLQNGRDMYVDQELDINRLSDYDVDAIVPQSFLKDDSIDNK | |
| | VLTRSDKNRGKSDNVPSEEVVKKMKNYWRQLLNAKLITQRKFDNLTKAERGGLSELDKAGFIKRQLVET | |
| | RQITKHVAQILDSRMNTKYDENDKLIREVKVITLKSKLVSDFRKDFQFYKVREINNYHHAHDAYLNAVVG | |
| | TALIKKYPKLESEFVYGDYKVYDVRKMIAKSEQEIGKATAKYFFYSNIMNFFKTEITLANGEIRKRPLIETNG | |
| | ETGEIVWDKGRDFATVRKVLSMPQVNIVKKTEVQTGGFSKESILPKRNSDKLIARKKDWDPKKYGGFDS | |
| | PTVAYSVLVVAKVEKGKSKKLKSVKELLGITIMERSSFEKNPIDFLEAKGYKEVKKDLIIKLPKYSLFELENGR | |
| | KRMLASAGELQKGNELALPSKYVNFLYLASHYEKLKGSPEDNEQKQLFVEQHKHYLDEIIEQISEFSKRVIL | |
| | ADANLDKVLSAYNKHRDKPIREQAENIIHLFTLTNLGAPAAFKYFDTTIDRKRYTSTKEVLDATLIHQSITGL | |
| | YETRIDLSQLGGD | |
| 1465 | RTLVTFKDVFVDFTREEWKLLDTAQQILYRNVMLENYKNLVSLGYQLTKPDVILRLEKGEEPWLV | KRAB |
| | | (AA) |
| 1488 | MKTPADTGFAFPDWAYKPESSPGSRQIQLWHFILELLRKEEYQGVIAWQGDYGEFVIKDPDEVARLWG | ERF |
| | VRKCKPQMNYDKLSRALRYYYNKRILHKTKGKRFTYKFNFNKLVLVNYPFIDVGLAGGAVPQSAPPVPSG | domain |
| | GSHFRFPPSTPSEVLSPTEDPRSPPACSSSSSSLFSAVVARRLGRGSVSDCSDGTSELEEPLGEDPRARPPG | (AA) |
| | PPDLGAFRGPPLARLPHDPGVFRVYPRPRGGPEPLSPFPVSPLAGPGSLLPPQLSPALPMTPTHLAYTPSP | |
| | TLSPMYPSGGGGPSGSGGGSHFSFSPEDMKRYLQAHTQSVYNYHLSPRAFLHYPGLVVPQPQRPDKCP | |
| | LPPMAPETPPVPSSASSSSSSSSSPFKFKLQPPPLGRRQRAAGEKAVAGADKSGGSAGGLAEGAGALAP | |
| | PPPPPQIKVEPISEGESEEVEVTDISDEDEEDGEVFKTPRAPPAPPKPEPGEAPGASQCMPLKLRFKRRWS | |
| | EDCRLEGGGGPAGGFEDEGEDKKVRGEGPGEAGGPLTPRRVSSDLQHATAQLSLEHRDS | |
| 1489 | MERVKMINVQRLLEAAEFLERRERECEHGYASSFPSMPSPRLQHSKPPRRLSRAQKHSSGSSNTSTANR | MXI1 |
| | STHNELEKNRRAHLRLCLERLKVLIPLGPDCTRHTTLGLLNKAKAHIKKLEEAERKSQHQLENLEREQRFLK | domain |
| | WRLEQLQGPQEMERIRMDSIGSTISSDRSDSEREEIEVDVESTEFSHGEVDNISTTSISDIDDHSSLPSIGS | (AA) |
| | DEGYSSASVKLSFTS | |
| 1490 | ASPKKKRKVEASGSGMNIQMLLEAADYLERREREAEHGYASMLPGSGMNIQMLLEAADYLERREREAE | SID4X |
| | HGYASMLPGSGMNIQMLLEAADYLERREREAEHGYASMLPGSGMNIQMLLEAADYLERREREAEHGY | domain |
| | ASMLPSRSR | (AA) |
| 1491 | MAAAVRMNIQMLLEAADYLERREREAEHGYASMLPYNNKDRDALKRRNKSKKNNSSSRST | MAD- |
| | HNEMEKNRRAHLRLCLEKLKGLVPLGPESSRHTTLSLLTKAKLHIKKLEDCDRKAVHQID | SID |
| | QLQREQRHLKRQLEKLGIERIRMDSIGSTVSSERSDSDREEIDVDVESTDYLTGDLDWSS | domain |
| | SSVSDSDERGSMQSLGSDEGYSSTSIKRIKLQDSHKACLG | (AA) |
| 1492 | MPAMPSSGPGDTSSSAAEREEDRKDGEEQEEPRGKEERQEPSTTARKVGRPGRKRKHPPVESGDTPKD | DNMT3A |
| | PAVISKSPSMAQDSGASELLPNGDLEKRSEPQPEEGSPAGGQKGGAPAEGEGAAETLPEASRAVENGC | (AA) |
| | CTPKEGRGAPAEAGKEQKETNIESMKMEGSRGRLRGGLGWESSLRQRPMPRLTFQAGDPYYISKRKRD | |
| | EWLARWKREAEKKAKVIAGMNAVEENQGPGESQKVEEASPPAVQQPTDPASPTVATTPEPVGSDAG | |
| | DKNATKAGDDEPEYEDGRGFGIGELVWGKLRGFSWWPGRIVSWWMTGRSRAAEGTRWVMWFGD | |
| | GKFSVVCVEKLMPLSSFCSAFHQATYNKQPMYRKAIYEVLQVASSRAGKLFPVCHDSDESDTAKAVEVQ | |
| | NKPMIEWALGGFQPSGPKGLEPPEEEKNPYKEVYTDMWVEPEAAAYAPPPPAKKPRKSTAEKPKVKEII | |
| | DERTRERLVYEVRQKCRNIEDICISCGSLNVTLEHPLFVGGMCQNCKNCFLECAYQYDDDGYQSYCTICC | |
| | GGREVLMCGNNNCCRCFCVECVDLLVGPGAAQAAIKEDPWNCYMCGHKGTYGLLRRREDWPSRLQ | |
| | MFFANNHDQEFDPPKVYPPVPAEKRKPIRVLSLFDGIATGLLVLKDLGIQVDRYIASEVCEDSITVGMVR | |
| | HQGKIMYVGDVRSVTQKHIQEWGPFDLVIGGSPCNDLSIVNPARKGLYEGTGRLFFEFYRLLHDARPKE | |
| | GDDRPFFWLFENVVAMGVSDKRDISRFLESNPVMIDAKEVSAAHRARYFWGNLPGMNRPLASTVNDK | |
| | LELQECLEHGRIAKFSKVRTITTRSNSIKQGKDQHFPVFMNEKEDILWCTEMERVFGFPVHYTDVSNMS | |
| | RLARQRLLGRSWSVPVIRHLFAPLKEYFA | |
| 1493 | MKGDTRHLNGEEDAGGREDSILVNGACSDQSSDSPPILEAIRTPEIRGRRSSSRLSKREVSSLLSYTQDLTG | DNMT3B |
| | DGDGEDGDGSDTPVMPKLFRETRTRSESPAVRTRNNNSVSSRERHRPSPRSTRGRQGRNHVDESPVEF | (AA) |
| | PATRSLRRRATASAGTPWPSPPSSYLTIDLTDDTEDTHGTPQSSSTPYARLAQDSQQGGMESPQVEADS | |
| | GDGDSSEYQDGKEFGIGDLVWGKIKGFSWWPAMVVSWKATSKRQAMSGMRWVQWFGDGKFSEV | |
| | SADKLVALGLFSQHFNLATFNKLVSYRKAMYHALEKARVRAGKTFPSSPGDSLEDQLKPMLEWAHGGF | |
| | KPTGIEGLKPNNTQPVVNKSKVRRAGSRKLESRKYENKTRRRTADDSATSDYCPAPKRLKTNCYNNGKD | |
| | RGDEDQSREQMASDVANNKSSLEDGCLSCGRKNPVSFHPLFEGGLCQTCRDRFLELFYMYDDDGYQSY | |
| | CTVCCEGRELLLCSNTSCCRCFCVECLEVLVGTGTAAEAKLQEPWSCYMCLPQRCHGVLRRRKDWNVR | |
| | LQAFFTSDTGLEYEAPKLYPAIPAARRRPIRVLSLFDGIATGYLVLKELGIKVGKYVASEVCEESIAVGTVKH | |
| | EGNIKYVNDVRNITKKNIEEWGPFDLVIGGSPCNDLSNVNPARKGLYEGTGRLFFEFYHLLNYSRPKEGD | |
| | DRPFFWMFENVVAMKVGDKRDISRFLECNPVMIDAIKVSAAHRARYFWGNLPGMNRPVIASKNDKLE | |
| | LQDCLEYNRIAKLKKVQTITTKSNSIKQGKNQLFPVVMNGKEDVLWCTELERIFGFPVHYTDVSNMGRG | |
| | ARQKLLGRSWSVPVIRHLFAPLKDYFACE | |
| 1494 | MLSGKKAAAAAAAAAAAATGTEAGPGTAGGSENGSEVAAQPAGLSGPAEVGPGAVGERTPRKKEPPR | LSD1 |
| | ASPPGGLAEPPGSAGPQAGPTVVPGSATPMETGIAETPEGRRTSRRKRAKVEYREMDESLANLSEDEYY | (AA) |
| | SEEERNAKAEKEKKLPPPPPQAPPEEENESEPEEPSGVEGAAFQSRLPHDRMTSQEAACFPDIISGPQQT | |
| | QKVFLFIRNRTLQLWLDNPKIQLTFEATLQQLEAPYNSDTVLVHRVHSYLERHGLINFGIYKRIKPLPTKKT | |
| | GKVIIIGSGVSGLAAARQLQSFGMDVTLLEARDRVGGRVATFRKGNYVADLGAMVVTGLGGNPMAVV | |
| | SKQVNMELAKIKQKCPLYEANGQAVPKEKDEMVEQEFNRLLEATSYLSHQLDFNVLNNKPVSLGQALE | |
| | VVIQLQEKHVKDEQIEHWKKIVKTQEELKELLNKMVNLKEKIKELHQQYKEASEVKPPRDITAEFLVKSKH | |
| | RDLTALCKEYDELAETQGKLEEKLQELEANPPSDVYLSSRDRQILDWHFANLEFANATPLSTLSLKHWDQ | |
| | DDDFEFTGSHLTVRNGYSCVPVALAEGLDIKLNTAVRQVRYTASGCEVIAVNTRSTSQTFIYKCDAVLCTL | |
| | PLGVLKQQPPAVQFVPPLPEWKTSAVQRMGFGNLNKVVLCFDRVFWDPSVNLFGHVGSTTASRGELF | |
| | LFWNLYKAPILLALVAGEAAGIMENISDDVIVGRCLAILKGIFGSSAVPQPKETVVSRWRADPWARGSYS | |
| | YVAAGSSGNDYDLMAQPITPGPSIPGAPQPIPRLFFAGEHTIRNYPATVHGALLSGLREAGRIADQFLGA | |
| | MYTLPRQATPGVPAQQSPSM | |
| 1495 | MAAIPALDPEAEPSMDVILVGSSELSSSVSPGTGRDLIAYEVKANQRNIEDICICCGSLQVHTQHPLFEGG | DNMT3L |
| | ICAPCKDKFLDALFLYDDDGYQSYCSICSGETLLICGNPDCTRCYCFECVDSLVGPGTSGKVHAMSNWVC | |
| | YLCLPSSSGLLQRRRKWRSQLKAFYDRESENPLEMFETVPVWRRQPVRVLSLFEDIKKELTSLGFLESGSD | |
| | PGQLKHVVDVTDTVRKDVEEWGPFDLVYGATPPLGHTCDRPPSWYLFQFHRLLQYARPKPGSPRPFF | |
| | WMFVDNLVLNKEDLDVASRFLEMEPVTIPDVHGGSLQNAVRVWSNIPAIRSRHWALVSEEELSLLAQN | |
| | KQSSKLAAKWPTKLVKNCFLPLREYFKYFSTELTSSL | |
| 1496 | NNNNGATT | PAM (N. |
| | | mening |
| | | iitdis) |
| 1497 | NNNNRYAC | PAM (C. |
| | | jejuni) |
| 1498 | NNAGAAW | PAM (S. |
| | | thermo- |
| | | philus) |
| 1499 | NAAAAC | PAM (T. |
| | | denticola) |
| 1500 | TTTV | PAM |
| | | (Cpf1) |
| 1501 | NGAN | PAM |
| 1502 | NGNG | PAM |
| 1503 | NGAG | PAM |
| 1504 | NGCG | PAM |
| 1505 | AACCACGATCAGGAGTTTGACCCCCCTAAGGTGTACCCACCCGTGCCAGCCGAGAAGAGGAAGCCC | DNMT3A/ |
| | ATCCGCGTGCTGTCCCTGTTCGACGGCATCGCCACAGGCCTGCTGGTGCTGAAGGATCTGGGCATC | L- |
| | CAGGTGGACAGATATATCGCCTCCGAGGTGTGCGAGGATTCTATCACCGTGGGCATGGTGAGGCA | dCas9- |
| | CCAGGGCAAGATCATGTACGTGGGCGACGTGCGCAGCGTGACACAGAAGCACATCCAGGAGTGG | KRAB |
| | GGACCCTTCGACCTGGTCATCGGAGGCAGCCCCTGTAATGACCTGTCCATCGTGAACCCTGCAAGG | (nt) |
| | AAGGGCCTGTATGAGGGAACCGGCAGACTGTTCTTTGAGTTCTACAGGCTGCTGCACGACGCCCGC | |
| | CCTAAGGAGGGCGATGACAGGCCATTCTTTTGGCTGTTTGAGAACGTGGTGGCCATGGGCGTGAG | |
| | CGACAAGCGGGATATCTCCAGATTCCTGGAGTCTAATCCCGTGATGATCGATGCAAAGGAGGTGTC | |
| | TGCCGCACACAGGGCAAGGTACTTTTGGGGAAATCTGCCTGGCATGAACCGCCCACTGGCCAGCAC | |
| | CGTGAACGACAAGCTGGAGCTGCAGGAGTGCCTGGAGCACGGAAGGATCGCCAAGTTCTCCAAGG | |
| | TGCGGACAATCACCACAAGATCTAACAGCATCAAGCAGGGCAAGGATCAGCACTTCCCCGTGTTCA | |
| | TGAATGAGAAGGAGGACATCCTGTGGTGTACCGAGATGGAGCGCGTGTTCGGCTTTCCAGTGCACT | |
| | ATACAGACGTGAGCAATATGAGCCGGCTGGCAAGGCAGAGACTGCTGGGCCGGTCCTGGTCTGTG | |
| | CCAGTGATCAGACACCTGTTCGCCCCCCTGAAGGAGTACTTTGCCTGCGTGTCTAGCGGCAACTCTA | |
| | ATGCCAACAGCAGAGGCCCTTCCTTTTCCTCTGGCCTGGTGCCACTGTCTCTGAGGGGCAGCCACAT | |
| | GGGCCCCATGGAGATCTACAAGACCGTGTCCGCCTGGAAGAGGCAGCCTGTGCGCGTGCTGTCTCT | |
| | GTTCCGCAACATCGACAAGGTGCTGAAGAGCCTGGGCTTTCTGGAGAGCGGATCCGGATCTGGAG | |
| | GAGGCACCCTGAAGTATGTGGAGGATGTGACAAATGTGGTGCGGAGAGATGTGGAGAAGTGGGG | |
| | CCCCTTCGATCTGGTGTACGGATCCACCCAGCCACTGGGAAGCTCCTGCGATAGGTGTCCAGGATG | |
| | GTATATGTTCCAGTTTCACAGAATCCTGCAGTACGCACTGCCAAGGCAGGAGAGCCAGCGCCCTTTC | |
| | TTTTGGATCTTTATGGACAACCTGCTGCTGACAGAGGATGACCAGGAGACAACAACCCGCTTCCTGC | |
| | AGACAGAGGCAGTGACCCTGCAGGATGTGAGGGGACGCGACTATCAGAATGCCATGCGGGTGTG | |
| | GTCTAACATCCCTGGCCTGAAGAGCAAGCACGCCCCCCTGACCCCTAAGGAGGAGGAGTACCTGCA | |
| | GGCCCAGGTGCGGAGCAGATCCAAGCTGGATGCCCCTAAGGTGGACCTGCTGGTGAAGAATTGTC | |
| | TGCTGCCACTGCGGGAGTACTTCAAGTACTTTAGTCAGAATAGCCTGCCACTGGAGGCAAGCGGAT | |
| | CCGGAAGGGCATCTCCTGGAATCCCAGGAAGCACCCGCAACCCCAAGAAGAAGCGGAAGGTGGGC | |
| | ATCCACGGCGTGCCCGCCGCCGACAAGAAGTACAGCATCGGCCTGGCCATCGGCACCAACAGCGT | |
| | GGGCTGGGCCGTGATCACCGACGAGTACAAGGTGCCCAGCAAGAAGTTCAAGGTGCTGGGCAACA | |
| | CCGACCGGCACAGCATCAAGAAGAACCTGATCGGCGCCCTGCTGTTCGACAGCGGCGAGACCGCC | |
| | GAGGCCACCCGGCTGAAGCGGACCGCCCGGCGGCGGTACACCCGGCGGAAGAACCGGATCTGCTA | |
| | CCTGCAGGAGATCTTCAGCAACGAGATGGCCAAGGTGGACGACAGCTTCTTCCACCGGCTGGAGG | |
| | AGAGCTTCCTGGTGGAGGAGGACAAGAAGCACGAGCGGCACCCCATCTTCGGCAACATCGTGGAC | |
| | GAGGTGGCCTACCACGAGAAGTACCCCACCATCTACCACCTGCGGAAGAAGCTGGTGGACAGCAC | |
| | CGACAAGGCCGACCTGCGGCTGATCTACCTGGCCCTGGCCCACATGATCAAGTTCCGGGGCCACTT | |
| | CCTGATCGAGGGCGACCTGAACCCCGACAACAGCGACGTGGACAAGCTGTTCATCCAGCTGGTGCA | |
| | GACCTACAACCAGCTGTTCGAGGAGAACCCCATCAACGCCAGCGGCGTGGACGCCAAGGCCATCCT | |
| | GAGCGCCCGGCTGAGCAAGAGCCGGCGGCTGGAGAACCTGATCGCCCAGCTGCCCGGCGAGAAG | |
| | AAGAACGGCCTGTTCGGCAACCTGATCGCCCTGAGCCTGGGCCTGACCCCCAACTTCAAGAGCAAC | |
| | TTCGACCTGGCCGAGGACGCCAAGCTGCAGCTGAGCAAGGACACCTACGACGACGACCTGGACAA | |
| | CCTGCTGGCCCAGATCGGCGACCAGTACGCCGACCTGTTCCTGGCCGCCAAGAACCTGAGCGACGC | |
| | CATCCTGCTGAGCGACATCCTGCGGGTGAACACCGAGATCACCAAGGCCCCCCTGAGCGCCAGCAT | |
| | GATCAAGCGGTACGACGAGCACCACCAGGACCTGACCCTGCTGAAGGCCCTGGTGCGGCAGCAGC | |
| | TGCCCGAGAAGTACAAGGAGATCTTCTTCGACCAGAGCAAGAACGGCTACGCCGGCTACATCGACG | |
| | GCGGCGCCAGCCAGGAGGAGTTCTACAAGTTCATCAAGCCCATCCTGGAGAAGATGGACGGCACC | |
| | GAGGAGCTGCTGGTGAAGCTGAACCGGGAGGACCTGCTGCGGAAGCAGCGGACCTTCGACAACG | |
| | GCAGCATCCCCCACCAGATCCACCTGGGCGAGCTGCACGCCATCCTGCGGCGGCAGGAGGACTTCT | |
| | ACCCCTTCCTGAAGGACAACCGGGAGAAGATCGAGAAGATCCTGACCTTCCGGATCCCCTACTACG | |
| | TGGGCCCCCTGGCCCGGGGCAACAGCCGGTTCGCCTGGATGACCCGGAAGAGCGAGGAGACCATC | |
| | ACCCCCTGGAACTTCGAGGAGGTGGTGGACAAGGGCGCCAGCGCCCAGAGCTTCATCGAGCGGAT | |
| | GACCAACTTCGACAAGAACCTGCCCAACGAGAAGGTGCTGCCCAAGCACAGCCTGCTGTACGAGTA | |
| | CTTCACCGTGTACAACGAGCTGACCAAGGTGAAGTACGTGACCGAGGGCATGCGGAAGCCCGCCTT | |
| | CCTGAGCGGCGAGCAGAAGAAGGCCATCGTGGACCTGCTGTTCAAGACCAACCGGAAGGTGACCG | |
| | TGAAGCAGCTGAAGGAGGACTACTTCAAGAAGATCGAGTGCTTCGACAGCGTGGAGATCAGCGGC | |
| | GTGGAGGACCGGTTCAACGCCAGCCTGGGCACCTACCACGACCTGCTGAAGATCATCAAGGACAA | |
| | GGACTTCCTGGACAACGAGGAGAACGAGGACATCCTGGAGGACATCGTGCTGACCCTGACCCTGTT | |
| | CGAGGACCGGGAGATGATCGAGGAGCGGCTGAAGACCTACGCCCACCTGTTCGACGACAAGGTGA | |
| | TGAAGCAGCTGAAGCGGCGGCGGTACACCGGCTGGGGCCGGCTGAGCCGGAAGCTGATCAACGG | |
| | CATCCGGGACAAGCAGAGCGGCAAGACCATCCTGGACTTCCTGAAGAGCGACGGCTTCGCCAACC | |
| | GGAACTTCATGCAGCTGATCCACGACGACAGCCTGACCTTCAAGGAGGACATCCAGAAGGCCCAG | |
| | GTGAGCGGCCAGGGCGACAGCCTGCACGAGCACATCGCCAACCTGGCCGGCAGCCCCGCCATCAA | |
| | GAAGGGCATCCTGCAGACCGTGAAGGTGGTGGACGAGCTGGTGAAGGTGATGGGCCGGCACAAG | |
| | CCCGAGAACATCGTGATCGAGATGGCCCGGGAGAACCAGACCACCCAGAAGGGCCAGAAGAACA | |
| | GCCGGGAGCGGATGAAGCGGATCGAGGAGGGCATCAAGGAGCTGGGCAGCCAGATCCTGAAGGA | |
| | GCACCCCGTGGAGAACACCCAGCTGCAGAACGAGAAGCTGTACCTGTACTACCTGCAGAACGGCC | |
| | GGGACATGTACGTGGACCAGGAGCTGGACATCAACCGGCTGAGCGACTACGACGTGGACGCCATC | |
| | GTGCCCCAGAGCTTCCTGAAGGACGACAGCATCGACAACAAGGTGCTGACCCGGAGCGACAAGAA | |
| | CCGGGGCAAGAGCGACAACGTGCCCAGCGAGGAGGTGGTGAAGAAGATGAAGAACTACTGGCGG | |
| | CAGCTGCTGAACGCCAAGCTGATCACCCAGCGGAAGTTCGACAACCTGACCAAGGCCGAGCGGGG | |
| | CGGCCTGAGCGAGCTGGACAAGGCCGGCTTCATCAAGCGGCAGCTGGTGGAGACCCGGCAGATCA | |
| | CCAAGCACGTGGCCCAGATCCTGGACAGCCGGATGAACACCAAGTACGACGAGAACGACAAGCTG | |
| | ATCCGGGAGGTGAAGGTGATCACCCTGAAGAGCAAGCTGGTGAGCGACTTCCGGAAGGACTTCCA | |
| | GTTCTACAAGGTGCGGGAGATCAACAACTACCACCACGCCCACGACGCCTACCTGAACGCCGTGGT | |
| | GGGCACCGCCCTGATCAAGAAGTACCCCAAGCTGGAGAGCGAGTTCGTGTACGGCGACTACAAGG | |
| | TGTACGACGTGCGGAAGATGATCGCCAAGAGCGAGCAGGAGATCGGCAAGGCCACCGCCAAGTAC | |
| | TTCTTCTACAGCAACATCATGAACTTCTTCAAGACCGAGATCACCCTGGCCAACGGCGAGATCCGGA | |
| | AGCGGCCCCTGATCGAGACCAACGGCGAGACCGGCGAGATCGTGTGGGACAAGGGCCGGGACTT | |
| | CGCCACCGTGCGGAAGGTGCTGAGCATGCCCCAGGTGAACATCGTGAAGAAGACCGAGGTGCAGA | |
| | CCGGCGGCTTCAGCAAGGAGAGCATCCTGCCCAAGCGGAACAGCGACAAGCTGATCGCCCGGAAG | |
| | AAGGACTGGGACCCCAAGAAGTACGGCGGCTTCGACAGCCCCACCGTGGCCTACAGCGTGCTGGT | |
| | GGTGGCCAAGGTGGAGAAGGGCAAGAGCAAGAAGCTGAAGAGCGTGAAGGAGCTGCTGGGCAT | |
| | CACCATCATGGAGCGGAGCAGCTTCGAGAAGAACCCCATCGACTTCCTGGAGGCCAAGGGCTACA | |
| | AGGAGGTGAAGAAGGACCTGATCATCAAGCTGCCCAAGTACAGCCTGTTCGAGCTGGAGAACGGC | |
| | CGGAAGCGGATGCTGGCCAGCGCCGGCGAGCTGCAGAAGGGCAACGAGCTGGCCCTGCCCAGCA | |
| | AGTACGTGAACTTCCTGTACCTGGCCAGCCACTACGAGAAGCTGAAGGGCAGCCCCGAGGACAAC | |
| | GAGCAGAAGCAGCTGTTCGTGGAGCAGCACAAGCACTACCTGGACGAGATCATCGAGCAGATCAG | |
| | CGAGTTCAGCAAGCGGGTGATCCTGGCCGACGCCAACCTGGACAAGGTGCTGAGCGCCTACAACA | |
| | AGCACCGGGACAAGCCCATCCGGGAGCAGGCCGAGAACATCATCCACCTGTTCACCCTGACCAACC | |
| | TGGGCGCCCCCGCCGCCTTCAAGTACTTCGACACCACCATCGACCGGAAGCGGTACACCAGCACCA | |
| | AGGAGGTGCTGGACGCCACCCTGATCCACCAGAGCATCACCGGCCTGTACGAGACCCGGATCGACC | |
| | TGAGCCAGCTGGGCGGCGACAGCGGCGGCAAGCGGCCCGCCGCCACCAAGAAGGCCGGCCAGGC | |
| | CAAGAAGAAGAAGGCTAGCGATGCTAAGTCACTGACTGCCTGGTCCCGGACACTGGTGACCTTCAA | |
| | GGATGTGTTTGTGGACTTCACCAGGGAGGAGTGGAAGCTGCTGGACACTGCTCAGCAGATCCTGTA | |
| | CAGAAATGTGATGCTGGAGAACTATAAGAACCTGGTTTCCTTGGGTTATCAGCTTACTAAGCCAGAT | |
| | GTGATCCTCCGGTTGGAGAAGGGAGAAGAGCCCTGGCTGGTGGAGAGAGAAATTCACCAAGAGA | |
| | CCCATCCTGATTCAGAGACTGCATTTGAAATCAAATCATCAGTTCCGAAAAAGAAACGCAAAGTT | |
| 1506 | NHDQEFDPPKVYPPVPAEKRKPIRVLSLFDGIATGLLVLKDLGIQVDRYIASEVCEDSITVGMVRHQGKIM | DNMT3A/ |
| | YVGDVRSVTQKHIQEWGPFDLVIGGSPCNDLSIVNPARKGLYEGTGRLFFEFYRLLHDARPKEGDDRPFF | L- |
| | WLFENVVAMGVSDKRDISRFLESNPVMIDAKEVSAAHRARYFWGNLPGMNRPLASTVNDKLELQECL | dCas9- |
| | EHGRIAKFSKVRTITTRSNSIKQGKDQHFPVFMNEKEDILWCTEMERVFGFPVHYTDVSNMSRLARQRL | KRAB |
| | LGRSWSVPVIRHLFAPLKEYFACVSSGNSNANSRGPSFSSGLVPLSLRGSHMGPMEIYKTVSAWKRQPV | (AA) |
| | RVLSLFRNIDKVLKSLGFLESGSGSGGGTLKYVEDVTNVVRRDVEKWGPFDLVYGSTQPLGSSCDRCPG | |
| | WYMFQFHRILQYALPRQESQRPFFWIFMDNLLLTEDDQETTTRFLQTEAVTLQDVRGRDYQNAMRV | |
| | WSNIPGLKSKHAPLTPKEEEYLQAQVRSRSKLDAPKVDLLVKNCLLPLREYFKYFSQNSLPLEASGSGRAS | |
| | PGIPGSTRNPKKKRKVGIHGVPAADKKYSIGLAIGTNSVGWAVITDEYKVPSKKFKVLGNTDRHSIKKNLI | |
| | GALLFDSGETAEATRLKRTARRRYTRRKNRICYLQEIFSNEMAKVDDSFFHRLEESFLVEEDKKHERHPIFG | |
| | NIVDEVAYHEKYPTIYHLRKKLVDSTDKADLRLIYLALAHMIKFRGHFLIEGDLNPDNSDVDKLFIQLVQTY | |
| | NQLFEENPINASGVDAKAILSARLSKSRRLENLIAQLPGEKKNGLFGNLIALSLGLTPNFKSNFDLAEDAKL | |
| | QLSKDTYDDDLDNLLAQIGDQYADLFLAAKNLSDAILLSDILRVNTEITKAPLSASMIKRYDEHHQDLTLLK | |
| | ALVRQQLPEKYKEIFFDQSKNGYAGYIDGGASQEEFYKFIKPILEKMDGTEELLVKLNREDLLRKQRTFDN | |
| | GSIPHQIHLGELHAILRRQEDFYPFLKDNREKIEKILTFRIPYYVGPLARGNSRFAWMTRKSEETITPWNFE | |
| | EVVDKGASAQSFIERMTNFDKNLPNEKVLPKHSLLYEYFTVYNELTKVKYVTEGMRKPAFLSGEQKKAIV | |
| | DLLFKTNRKVTVKQLKEDYFKKIECFDSVEISGVEDRFNASLGTYHDLLKIIKDKDFLDNEENEDILEDIVLTL | |
| | TLFEDREMIEERLKTYAHLFDDKVMKQLKRRRYTGWGRLSRKLINGIRDKQSGKTILDFLKSDGFANRNF | |
| | MQLIHDDSLTFKEDIQKAQVSGQGDSLHEHIANLAGSPAIKKGILQTVKVVDELVKVMGRHKPENIVIE | |
| | MARENQTTQKGQKNSRERMKRIEEGIKELGSQILKEHPVENTQLQNEKLYLYYLQNGRDMYVDQELDI | |
| | NRLSDYDVDAIVPQSFLKDDSIDNKVLTRSDKNRGKSDNVPSEEVVKKMKNYWRQLLNAKLITQRKFDN | |
| | LTKAERGGLSELDKAGFIKRQLVETRQITKHVAQILDSRMNTKYDENDKLIREVKVITLKSKLVSDFRKDFQ | |
| | FYKVREINNYHHAHDAYLNAVVGTALIKKYPKLESEFVYGDYKVYDVRKMIAKSEQEIGKATAKYFFYSNI | |
| | MNFFKTEITLANGEIRKRPLIETNGETGEIVWDKGRDFATVRKVLSMPQVNIVKKTEVQTGGFSKESILPK | |
| | RNSDKLIARKKDWDPKKYGGFDSPTVAYSVLVVAKVEKGKSKKLKSVKELLGITIMERSSFEKNPIDFLEAK | |
| | GYKEVKKDLIIKLPKYSLFELENGRKRMLASAGELQKGNELALPSKYVNFLYLASHYEKLKGSPEDNEQKQL | |
| | FVEQHKHYLDEIIEQISEFSKRVILADANLDKVLSAYNKHRDKPIREQAENIIHLFTLTNLGAPAAFKYFDTTI | |
| | DRKRYTSTKEVLDATLIHQSITGLYETRIDLSQLGGDSGGKRPAATKKAGQAKKKKASDAKSLTAWSRTLV | |
| | TFKDVFVDFTREEWKLLDTAQQILYRNVMLENYKNLVSLGYQLTKPDVILRLEKGEEPWLVEREIHQETH | |
| | PDSETAFEIKSSVPKKKRKV | |
| 1507 | ATGAACCACGATCAGGAGTTTGACCCCCCTAAGGTGTACCCACCCGTGCCAGCCGAGAAGAGGAA | DNMT3A/ |
| | GCCCATCCGCGTGCTGTCCCTGTTCGACGGCATCGCCACAGGCCTGCTGGTGCTGAAGGATCTGGG | L- |
| | CATCCAGGTGGACAGATATATCGCCTCCGAGGTGTGCGAGGATTCTATCACCGTGGGCATGGTGAG | XTEN80- |
| | GCACCAGGGCAAGATCATGTACGTGGGCGACGTGCGCAGCGTGACACAGAAGCACATCCAGGAGT | dSpCas9- |
| | GGGGACCCTTCGACCTGGTCATCGGAGGCAGCCCCTGTAATGACCTGTCCATCGTGAACCCTGCAA | KRAB |
| | GGAAGGGCCTGTATGAGGGAACCGGCAGACTGTTCTTTGAGTTCTACAGGCTGCTGCACGACGCCC | (nt) |
| | GCCCTAAGGAGGGCGATGACAGGCCATTCTTTTGGCTGTTTGAGAACGTGGTGGCCATGGGCGTG | |
| | AGCGACAAGCGGGATATCTCCAGATTCCTGGAGTCTAATCCCGTGATGATCGATGCAAAGGAGGTG | |
| | TCTGCCGCACACAGGGCAAGGTACTTTTGGGGAAATCTGCCTGGCATGAACCGCCCACTGGCCAGC | |
| | ACCGTGAACGACAAGCTGGAGCTGCAGGAGTGCCTGGAGCACGGAAGGATCGCCAAGTTCTCCAA | |
| | GGTGCGGACAATCACCACAAGATCTAACAGCATCAAGCAGGGCAAGGATCAGCACTTCCCCGTGTT | |
| | CATGAATGAGAAGGAGGACATCCTGTGGTGTACCGAGATGGAGCGCGTGTTCGGCTTTCCAGTGC | |
| | ACTATACAGACGTGAGCAATATGAGCCGGCTGGCAAGGCAGAGACTGCTGGGCCGGTCCTGGTCT | |
| | GTGCCAGTGATCAGACACCTGTTCGCCCCCCTGAAGGAGTACTTTGCCTGCGTGTCTAGCGGCAACT | |
| | CTAATGCCAACAGCAGAGGCCCTTCCTTTTCCTCTGGCCTGGTGCCACTGTCTCTGAGGGGCAGCCA | |
| | CATGGGCCCCATGGAGATCTACAAGACCGTGTCCGCCTGGAAGAGGCAGCCTGTGCGCGTGCTGTC | |
| | TCTGTTCCGCAACATCGACAAGGTGCTGAAGAGCCTGGGCTTTCTGGAGAGCGGATCCGGATCTGG | |
| | AGGAGGCACCCTGAAGTATGTGGAGGATGTGACAAATGTGGTGCGGAGAGATGTGGAGAAGTGG | |
| | GGCCCCTTCGATCTGGTGTACGGATCCACCCAGCCACTGGGAAGCTCCTGCGATAGGTGTCCAGGA | |
| | TGGTATATGTTCCAGTTTCACAGAATCCTGCAGTACGCACTGCCAAGGCAGGAGAGCCAGCGCCCT | |
| | TTCTTTTGGATCTTTATGGACAACCTGCTGCTGACAGAGGATGACCAGGAGACAACAACCCGCTTCC | |
| | TGCAGACAGAGGCAGTGACCCTGCAGGATGTGAGGGGACGCGACTATCAGAATGCCATGCGGGTG | |
| | TGGTCTAACATCCCTGGCCTGAAGAGCAAGCACGCCCCCCTGACCCCTAAGGAGGAGGAGTACCTG | |
| | CAGGCCCAGGTGCGGAGCAGATCCAAGCTGGATGCCCCTAAGGTGGACCTGCTGGTGAAGAATTG | |
| | TCTGCTGCCACTGCGGGAGTACTTCAAGTACTTTAGTCAGAATAGCCTGCCACTGGGAGGGCCGAG | |
| | CTCTGGCGCACCCCCACCAAGTGGAGGGTCTCCTGCCGGGTCCCCAACATCTACTGAAGAAGGCAC | |
| | CAGCGAATCCGCAACGCCCGAGTCAGGCCCTGGTACCTCCACAGAACCATCTGAAGGTAGTGCGCC | |
| | TGGTTCCCCAGCTGGAAGCCCTACTTCCACCGAAGAAGGCACGTCAACCGAACCAAGTGAAGGATC | |
| | TGCCCCTGGGACCAGCACTGAACCATCTGAGGTTAACCCCAAGAAGAAGCGGAAGGTGGGCATCC | |
| | ACGGCGTGCCCGCCGCCGACAAGAAGTACAGCATCGGCCTGGCCATCGGCACCAACAGCGTGGGC | |
| | TGGGCCGTGATCACCGACGAGTACAAGGTGCCCAGCAAGAAGTTCAAGGTGCTGGGCAACACCGA | |
| | CCGGCACAGCATCAAGAAGAACCTGATCGGCGCCCTGCTGTTCGACAGCGGCGAGACCGCCGAGG | |
| | CCACCCGGCTGAAGCGGACCGCCCGGCGGCGGTACACCCGGCGGAAGAACCGGATCTGCTACCTG | |
| | CAGGAGATCTTCAGCAACGAGATGGCCAAGGTGGACGACAGCTTCTTCCACCGGCTGGAGGAGAG | |
| | CTTCCTGGTGGAGGAGGACAAGAAGCACGAGCGGCACCCCATCTTCGGCAACATCGTGGACGAGG | |
| | TGGCCTACCACGAGAAGTACCCCACCATCTACCACCTGCGGAAGAAGCTGGTGGACAGCACCGACA | |
| | AGGCCGACCTGCGGCTGATCTACCTGGCCCTGGCCCACATGATCAAGTTCCGGGGCCACTTCCTGAT | |
| | CGAGGGCGACCTGAACCCCGACAACAGCGACGTGGACAAGCTGTTCATCCAGCTGGTGCAGACCT | |
| | ACAACCAGCTGTTCGAGGAGAACCCCATCAACGCCAGCGGCGTGGACGCCAAGGCCATCCTGAGC | |
| | GCCCGGCTGAGCAAGAGCCGGCGGCTGGAGAACCTGATCGCCCAGCTGCCCGGCGAGAAGAAGA | |
| | ACGGCCTGTTCGGCAACCTGATCGCCCTGAGCCTGGGCCTGACCCCCAACTTCAAGAGCAACTTCGA | |
| | CCTGGCCGAGGACGCCAAGCTGCAGCTGAGCAAGGACACCTACGACGACGACCTGGACAACCTGC | |
| | TGGCCCAGATCGGCGACCAGTACGCCGACCTGTTCCTGGCCGCCAAGAACCTGAGCGACGCCATCC | |
| | TGCTGAGCGACATCCTGCGGGTGAACACCGAGATCACCAAGGCCCCCCTGAGCGCCAGCATGATCA | |
| | AGCGGTACGACGAGCACCACCAGGACCTGACCCTGCTGAAGGCCCTGGTGCGGCAGCAGCTGCCC | |
| | GAGAAGTACAAGGAGATCTTCTTCGACCAGAGCAAGAACGGCTACGCCGGCTACATCGACGGCGG | |
| | CGCCAGCCAGGAGGAGTTCTACAAGTTCATCAAGCCCATCCTGGAGAAGATGGACGGCACCGAGG | |
| | AGCTGCTGGTGAAGCTGAACCGGGAGGACCTGCTGCGGAAGCAGCGGACCTTCGACAACGGCAGC | |
| | ATCCCCCACCAGATCCACCTGGGCGAGCTGCACGCCATCCTGCGGCGGCAGGAGGACTTCTACCCC | |
| | TTCCTGAAGGACAACCGGGAGAAGATCGAGAAGATCCTGACCTTCCGGATCCCCTACTACGTGGGC | |
| | CCCCTGGCCCGGGGCAACAGCCGGTTCGCCTGGATGACCCGGAAGAGCGAGGAGACCATCACCCC | |
| | CTGGAACTTCGAGGAGGTGGTGGACAAGGGCGCCAGCGCCCAGAGCTTCATCGAGCGGATGACCA | |
| | ACTTCGACAAGAACCTGCCCAACGAGAAGGTGCTGCCCAAGCACAGCCTGCTGTACGAGTACTTCA | |
| | CCGTGTACAACGAGCTGACCAAGGTGAAGTACGTGACCGAGGGCATGCGGAAGCCCGCCTTCCTG | |
| | AGCGGCGAGCAGAAGAAGGCCATCGTGGACCTGCTGTTCAAGACCAACCGGAAGGTGACCGTGAA | |
| | GCAGCTGAAGGAGGACTACTTCAAGAAGATCGAGTGCTTCGACAGCGTGGAGATCAGCGGCGTGG | |
| | AGGACCGGTTCAACGCCAGCCTGGGCACCTACCACGACCTGCTGAAGATCATCAAGGACAAGGACT | |
| | TCCTGGACAACGAGGAGAACGAGGACATCCTGGAGGACATCGTGCTGACCCTGACCCTGTTCGAG | |
| | GACCGGGAGATGATCGAGGAGCGGCTGAAGACCTACGCCCACCTGTTCGACGACAAGGTGATGAA | |
| | GCAGCTGAAGCGGCGGCGGTACACCGGCTGGGGCCGGCTGAGCCGGAAGCTGATCAACGGCATC | |
| | CGGGACAAGCAGAGCGGCAAGACCATCCTGGACTTCCTGAAGAGCGACGGCTTCGCCAACCGGAA | |
| | CTTCATGCAGCTGATCCACGACGACAGCCTGACCTTCAAGGAGGACATCCAGAAGGCCCAGGTGAG | |
| | CGGCCAGGGCGACAGCCTGCACGAGCACATCGCCAACCTGGCCGGCAGCCCCGCCATCAAGAAGG | |
| | GCATCCTGCAGACCGTGAAGGTGGTGGACGAGCTGGTGAAGGTGATGGGCCGGCACAAGCCCGA | |
| | GAACATCGTGATCGAGATGGCCCGGGAGAACCAGACCACCCAGAAGGGCCAGAAGAACAGCCGG | |
| | GAGCGGATGAAGCGGATCGAGGAGGGCATCAAGGAGCTGGGCAGCCAGATCCTGAAGGAGCACC | |
| | CCGTGGAGAACACCCAGCTGCAGAACGAGAAGCTGTACCTGTACTACCTGCAGAACGGCCGGGAC | |
| | ATGTACGTGGACCAGGAGCTGGACATCAACCGGCTGAGCGACTACGACGTGGACGCCATCGTGCC | |
| | CCAGAGCTTCCTGAAGGACGACAGCATCGACAACAAGGTGCTGACCCGGAGCGACAAGAACCGGG | |
| | GCAAGAGCGACAACGTGCCCAGCGAGGAGGTGGTGAAGAAGATGAAGAACTACTGGCGGCAGCT | |
| | GCTGAACGCCAAGCTGATCACCCAGCGGAAGTTCGACAACCTGACCAAGGCCGAGCGGGGCGGCC | |
| | TGAGCGAGCTGGACAAGGCCGGCTTCATCAAGCGGCAGCTGGTGGAGACCCGGCAGATCACCAAG | |
| | CACGTGGCCCAGATCCTGGACAGCCGGATGAACACCAAGTACGACGAGAACGACAAGCTGATCCG | |
| | GGAGGTGAAGGTGATCACCCTGAAGAGCAAGCTGGTGAGCGACTTCCGGAAGGACTTCCAGTTCT | |
| | ACAAGGTGCGGGAGATCAACAACTACCACCACGCCCACGACGCCTACCTGAACGCCGTGGTGGGC | |
| | ACCGCCCTGATCAAGAAGTACCCCAAGCTGGAGAGCGAGTTCGTGTACGGCGACTACAAGGTGTAC | |
| | GACGTGCGGAAGATGATCGCCAAGAGCGAGCAGGAGATCGGCAAGGCCACCGCCAAGTACTTCTT | |
| | CTACAGCAACATCATGAACTTCTTCAAGACCGAGATCACCCTGGCCAACGGCGAGATCCGGAAGCG | |
| | GCCCCTGATCGAGACCAACGGCGAGACCGGCGAGATCGTGTGGGACAAGGGCCGGGACTTCGCCA | |
| | CCGTGCGGAAGGTGCTGAGCATGCCCCAGGTGAACATCGTGAAGAAGACCGAGGTGCAGACCGGC | |
| | GGCTTCAGCAAGGAGAGCATCCTGCCCAAGCGGAACAGCGACAAGCTGATCGCCCGGAAGAAGGA | |
| | CTGGGACCCCAAGAAGTACGGCGGCTTCGACAGCCCCACCGTGGCCTACAGCGTGCTGGTGGTGG | |
| | CCAAGGTGGAGAAGGGCAAGAGCAAGAAGCTGAAGAGCGTGAAGGAGCTGCTGGGCATCACCAT | |
| | CATGGAGCGGAGCAGCTTCGAGAAGAACCCCATCGACTTCCTGGAGGCCAAGGGCTACAAGGAGG | |
| | TGAAGAAGGACCTGATCATCAAGCTGCCCAAGTACAGCCTGTTCGAGCTGGAGAACGGCCGGAAG | |
| | CGGATGCTGGCCAGCGCCGGCGAGCTGCAGAAGGGCAACGAGCTGGCCCTGCCCAGCAAGTACGT | |
| | GAACTTCCTGTACCTGGCCAGCCACTACGAGAAGCTGAAGGGCAGCCCCGAGGACAACGAGCAGA | |
| | AGCAGCTGTTCGTGGAGCAGCACAAGCACTACCTGGACGAGATCATCGAGCAGATCAGCGAGTTC | |
| | AGCAAGCGGGTGATCCTGGCCGACGCCAACCTGGACAAGGTGCTGAGCGCCTACAACAAGCACCG | |
| | GGACAAGCCCATCCGGGAGCAGGCCGAGAACATCATCCACCTGTTCACCCTGACCAACCTGGGCGC | |
| | CCCCGCCGCCTTCAAGTACTTCGACACCACCATCGACCGGAAGCGGTACACCAGCACCAAGGAGGT | |
| | GCTGGACGCCACCCTGATCCACCAGAGCATCACCGGCCTGTACGAGACCCGGATCGACCTGAGCCA | |
| | GCTGGGCGGCGACAGCGGCGGCAAGCGGCCCGCCGCCACCAAGAAGGCCGGCCAGGCCAAGAAG | |
| | AAGAAGGCTAGCGATGCTAAGTCACTGACTGCCTGGTCCCGGACACTGGTGACCTTCAAGGATGTG | |
| | TTTGTGGACTTCACCAGGGAGGAGTGGAAGCTGCTGGACACTGCTCAGCAGATCCTGTACAGAAAT | |
| | GTGATGCTGGAGAACTATAAGAACCTGGTTTCCTTGGGTTATCAGCTTACTAAGCCAGATGTGATCC | |
| | TCCGGTTGGAGAAGGGAGAAGAGCCCTGGCTGGTGGAGAGAGAAATTCACCAAGAGACCCATCCT | |
| | GATTCAGAGACTGCATTTGAAATCAAATCATCAGTTCCGAAAAAGAAACGCAAAGTTTAG | |
| 1508 | MNHDQEFDPPKVYPPVPAEKRKPIRVLSLFDGIATGLLVLKDLGIQVDRYIASEVCEDSITVGMVRHQGKI | DNMT3A/ |
| | MYVGDVRSVTQKHIQEWGPFDLVIGGSPCNDLSIVNPARKGLYEGTGRLFFEFYRLLHDARPKEGDDRP | L- |
| | FFWLFENVVAMGVSDKRDISRFLESNPVMIDAKEVSAAHRARYFWGNLPGMNRPLASTVNDKLELQE | XTEN80- |
| | CLEHGRIAKFSKVRTITTRSNSIKQGKDQHFPVFMNEKEDILWCTEMERVFGFPVHYTDVSNMSRLARQ | dSpCas9- |
| | RLLGRSWSVPVIRHLFAPLKEYFACVSSGNSNANSRGPSFSSGLVPLSLRGSHMGPMEIYKTVSAWKRQ | KRAB |
| | PVRVLSLFRNIDKVLKSLGFLESGSGSGGGTLKYVEDVTNVVRRDVEKWGPFDLVYGSTQPLGSSCDRCP | (AA) |
| | GWYMFQFHRILQYALPRQESQRPFFWIFMDNLLLTEDDQETTTRFLQTEAVTLQDVRGRDYQNAMRV | |
| | WSNIPGLKSKHAPLTPKEEEYLQAQVRSRSKLDAPKVDLLVKNCLLPLREYFKYFSQNSLPLGGPSSGAPP | |
| | PSGGSPAGSPTSTEEGTSESATPESGPGTSTEPSEGSAPGSPAGSPTSTEEGTSTEPSEGSAPGTSTEPSEV | |
| | NPKKKRKVGIHGVPAADKKYSIGLAIGTNSVGWAVITDEYKVPSKKFKVLGNTDRHSIKKNLIGALLFDSG | |
| | ETAEATRLKRTARRRYTRRKNRICYLQEIFSNEMAKVDDSFFHRLEESFLVEEDKKHERHPIFGNIVDEVAY | |
| | HEKYPTIYHLRKKLVDSTDKADLRLIYLALAHMIKFRGHFLIEGDLNPDNSDVDKLFIQLVQTYNQLFEENP | |
| | INASGVDAKAILSARLSKSRRLENLIAQLPGEKKNGLFGNLIALSLGLTPNFKSNFDLAEDAKLQLSKDTYD | |
| | DDLDNLLAQIGDQYADLFLAAKNLSDAILLSDILRVNTEITKAPLSASMIKRYDEHHQDLTLLKALVRQQLP | |
| | EKYKEIFFDQSKNGYAGYIDGGASQEEFYKFIKPILEKMDGTEELLVKLNREDLLRKQRTFDNGSIPHQIHL | |
| | GELHAILRRQEDFYPFLKDNREKIEKILTFRIPYYVGPLARGNSRFAWMTRKSEETITPWNFEEVVDKGAS | |
| | AQSFIERMTNFDKNLPNEKVLPKHSLLYEYFTVYNELTKVKYVTEGMRKPAFLSGEQKKAIVDLLFKTNRK | |
| | VTVKQLKEDYFKKIECFDSVEISGVEDRFNASLGTYHDLLKIIKDKDFLDNEENEDILEDIVLTLTLFEDREMI | |
| | EERLKTYAHLFDDKVMKQLKRRRYTGWGRLSRKLINGIRDKQSGKTILDFLKSDGFANRNFMQLIHDDSL | |
| | TFKEDIQKAQVSGQGDSLHEHIANLAGSPAIKKGILQTVKVVDELVKVMGRHKPENIVIEMARENQTTQ | |
| | KGQKNSRERMKRIEEGIKELGSQILKEHPVENTQLQNEKLYLYYLQNGRDMYVDQELDINRLSDYDVDAI | |
| | VPQSFLKDDSIDNKVLTRSDKNRGKSDNVPSEEVVKKMKNYWRQLLNAKLITQRKFDNLTKAERGGLSE | |
| | LDKAGFIKRQLVETRQITKHVAQILDSRMNTKYDENDKLIREVKVITLKSKLVSDFRKDFQFYKVREINNYH | |
| | HAHDAYLNAVVGTALIKKYPKLESEFVYGDYKVYDVRKMIAKSEQEIGKATAKYFFYSNIMNFFKTEITLA | |
| | NGEIRKRPLIETNGETGEIVWDKGRDFATVRKVLSMPQVNIVKKTEVQTGGFSKESILPKRNSDKLIARKK | |
| | DWDPKKYGGFDSPTVAYSVLVVAKVEKGKSKKLKSVKELLGITIMERSSFEKNPIDFLEAKGYKEVKKDLII | |
| | KLPKYSLFELENGRKRMLASAGELQKGNELALPSKYVNFLYLASHYEKLKGSPEDNEQKQLFVEQHKHYL | |
| | DEIIEQISEFSKRVILADANLDKVLSAYNKHRDKPIREQAENIIHLFTLTNLGAPAAFKYFDTTIDRKRYTSTK | |
| | EVLDATLIHQSITGLYETRIDLSQLGGDSGGKRPAATKKAGQAKKKKASDAKSLTAWSRTLVTFKDVFVD | |
| | FTREEWKLLDTAQQILYRNVMLENYKNLVSLGYQLTKPDVILRLEKGEEPWLVEREIHQETHPDSETAFEI | |
| | KSSVPKKKRKV | |
| 1509 | AGTAACCATGACCAGGAATTTGACCCCCCAAAGGTTTACCCACCTGTGCCAGCTGAGAAGAGGAAG | DNMT3A/ |
| | CCCATCCGCGTGCTGTCTCTCTTTGATGGGATTGCTACAGGGCTCCTGGTGCTGAAGGACCTGGGCA | L(CRISP |
| | TCCAAGTGGACCGCTACATTGCCTCCGAGGTGTGTGAGGACTCCATCACGGTGGGCATGGTGCGGC | ROFF)- |
| | ACCAGGGAAAGATCATGTACGTCGGGGACGTCCGCAGCGTCACACAGAAGCATATCCAGGAGTGG | XTEN80- |
| | GGCCCATTCGACCTGGTGATTGGAGGCAGTCCCTGCAATGACCTCTCCATTGTCAACCCTGCCCGCA | dSpCas9- |
| | AGGGACTTTATGAGGGTACTGGCCGCCTCTTCTTTGAGTTCTACCGCCTCCTGCATGATGCGCGGCC | KRAB |
| | CAAGGAGGGAGATGATCGCCCCTTCTTCTGGCTCTTTGAGAATGTGGTGGCCATGGGCGTTAGTGA | (nt) |
| | CAAGAGGGACATCTCGCGATTTCTTGAGTCTAACCCCGTGATGATTGACGCCAAAGAAGTGTCTGCT | |
| | GCACACAGGGCCCGTTACTTCTGGGGTAACCTTCCTGGCATGAACAGGCCTTTGGCATCCACTGTGA | |
| | ATGATAAGCTGGAGCTGCAAGAGTGTCTGGAGCACGGCAGAATAGCCAAGTTCAGCAAAGTGAGG | |
| | ACCATTACCACCAGGTCAAACTCTATAAAGCAGGGCAAAGACCAGCATTTCCCCGTCTTCATGAACG | |
| | AGAAGGAGGACATCCTGTGGTGCACTGAAATGGAAAGGGTGTTTGGCTTCCCCGTCCACTACACAG | |
| | ACGTCTCCAACATGAGCCGCTTGGCGAGGCAGAGACTGCTGGGCCGATCGTGGAGCGTGCCGGTC | |
| | ATCCGCCACCTCTTCGCTCCGCTGAAGGAATATTTTGCTTGTGTGTCTAGCGGCAATAGTAACGCTA | |
| | ACAGCCGCGGGCCGAGCTTCAGCAGCGGCCTGGTGCCGTTAAGCTTGCGCGGCAGCCATATGGGC | |
| | CCTATGGAGATATACAAGACAGTGTCTGCATGGAAGAGACAGCCAGTGCGGGTACTGAGCCTCTTC | |
| | AGAAACATCGACAAGGTACTAAAGAGTTTGGGCTTCTTGGAAAGCGGTTCTGGTTCTGGGGGAGG | |
| | AACGCTGAAGTACGTGGAAGATGTCACAAATGTCGTGAGGAGAGACGTGGAGAAATGGGGCCCCT | |
| | TTGACCTGGTGTACGGCTCGACGCAGCCCCTAGGCAGCTCTTGTGATCGCTGTCCCGGCTGGTACAT | |
| | GTTCCAGTTCCACCGGATCCTGCAGTATGCGCTGCCTCGCCAGGAGAGTCAGCGGCCCTTCTTCTGG | |
| | ATATTCATGGACAATCTGCTGCTGACTGAGGATGACCAAGAGACAACTACCCGCTTCCTTCAGACAG | |
| | AGGCTGTGACCCTCCAGGATGTCCGTGGCAGAGACTACCAGAATGCTATGCGGGTGTGGAGCAAC | |
| | ATTCCAGGGCTGAAGAGCAAGCATGCGCCCCTGACCCCAAAGGAAGAAGAGTATCTGCAAGCCCA | |
| | AGTCAGAAGCAGGAGCAAGCTGGACGCCCCGAAAGTTGACCTCCTGGTGAAGAACTGCCTTCTCCC | |
| | GCTGAGAGAGTACTTCAAGTATTTTTCTCAAAACTCACTTCCTCTTGGAGGGCCGAGCTCTGGCGCA | |
| | CCCCCACCAAGTGGAGGGTCTCCTGCCGGGTCCCCAACATCTACTGAAGAAGGCACCAGCGAATCC | |
| | GCAACGCCCGAGTCAGGCCCTGGTACCTCCACAGAACCATCTGAAGGTAGTGCGCCTGGTTCCCCA | |
| | GCTGGAAGCCCTACTTCCACCGAAGAAGGCACGTCAACCGAACCAAGTGAAGGATCTGCCCCTGGG | |
| | ACCAGCACTGAACCATCTGAGGTTAACCCCAAGAAGAAGCGGAAGGTGGGCATCCACGGCGTGCC | |
| | CGCCGCCGACAAGAAGTACAGCATCGGCCTGGCCATCGGCACCAACAGCGTGGGCTGGGCCGTGA | |
| | TCACCGACGAGTACAAGGTGCCCAGCAAGAAGTTCAAGGTGCTGGGCAACACCGACCGGCACAGC | |
| | ATCAAGAAGAACCTGATCGGCGCCCTGCTGTTCGACAGCGGCGAGACCGCCGAGGCCACCCGGCT | |
| | GAAGCGGACCGCCCGGCGGCGGTACACCCGGCGGAAGAACCGGATCTGCTACCTGCAGGAGATCT | |
| | TCAGCAACGAGATGGCCAAGGTGGACGACAGCTTCTTCCACCGGCTGGAGGAGAGCTTCCTGGTG | |
| | GAGGAGGACAAGAAGCACGAGCGGCACCCCATCTTCGGCAACATCGTGGACGAGGTGGCCTACCA | |
| | CGAGAAGTACCCCACCATCTACCACCTGCGGAAGAAGCTGGTGGACAGCACCGACAAGGCCGACCT | |
| | GCGGCTGATCTACCTGGCCCTGGCCCACATGATCAAGTTCCGGGGCCACTTCCTGATCGAGGGCGA | |
| | CCTGAACCCCGACAACAGCGACGTGGACAAGCTGTTCATCCAGCTGGTGCAGACCTACAACCAGCT | |
| | GTTCGAGGAGAACCCCATCAACGCCAGCGGCGTGGACGCCAAGGCCATCCTGAGCGCCCGGCTGA | |
| | GCAAGAGCCGGCGGCTGGAGAACCTGATCGCCCAGCTGCCCGGCGAGAAGAAGAACGGCCTGTTC | |
| | GGCAACCTGATCGCCCTGAGCCTGGGCCTGACCCCCAACTTCAAGAGCAACTTCGACCTGGCCGAG | |
| | GACGCCAAGCTGCAGCTGAGCAAGGACACCTACGACGACGACCTGGACAACCTGCTGGCCCAGAT | |
| | CGGCGACCAGTACGCCGACCTGTTCCTGGCCGCCAAGAACCTGAGCGACGCCATCCTGCTGAGCGA | |
| | CATCCTGCGGGTGAACACCGAGATCACCAAGGCCCCCCTGAGCGCCAGCATGATCAAGCGGTACGA | |
| | CGAGCACCACCAGGACCTGACCCTGCTGAAGGCCCTGGTGCGGCAGCAGCTGCCCGAGAAGTACA | |
| | AGGAGATCTTCTTCGACCAGAGCAAGAACGGCTACGCCGGCTACATCGACGGCGGCGCCAGCCAG | |
| | GAGGAGTTCTACAAGTTCATCAAGCCCATCCTGGAGAAGATGGACGGCACCGAGGAGCTGCTGGT | |
| | GAAGCTGAACCGGGAGGACCTGCTGCGGAAGCAGCGGACCTTCGACAACGGCAGCATCCCCCACC | |
| | AGATCCACCTGGGCGAGCTGCACGCCATCCTGCGGCGGCAGGAGGACTTCTACCCCTTCCTGAAGG | |
| | ACAACCGGGAGAAGATCGAGAAGATCCTGACCTTCCGGATCCCCTACTACGTGGGCCCCCTGGCCC | |
| | GGGGCAACAGCCGGTTCGCCTGGATGACCCGGAAGAGCGAGGAGACCATCACCCCCTGGAACTTC | |
| | GAGGAGGTGGTGGACAAGGGCGCCAGCGCCCAGAGCTTCATCGAGCGGATGACCAACTTCGACAA | |
| | GAACCTGCCCAACGAGAAGGTGCTGCCCAAGCACAGCCTGCTGTACGAGTACTTCACCGTGTACAA | |
| | CGAGCTGACCAAGGTGAAGTACGTGACCGAGGGCATGCGGAAGCCCGCCTTCCTGAGCGGCGAGC | |
| | AGAAGAAGGCCATCGTGGACCTGCTGTTCAAGACCAACCGGAAGGTGACCGTGAAGCAGCTGAAG | |
| | GAGGACTACTTCAAGAAGATCGAGTGCTTCGACAGCGTGGAGATCAGCGGCGTGGAGGACCGGTT | |
| | CAACGCCAGCCTGGGCACCTACCACGACCTGCTGAAGATCATCAAGGACAAGGACTTCCTGGACAA | |
| | CGAGGAGAACGAGGACATCCTGGAGGACATCGTGCTGACCCTGACCCTGTTCGAGGACCGGGAGA | |
| | TGATCGAGGAGCGGCTGAAGACCTACGCCCACCTGTTCGACGACAAGGTGATGAAGCAGCTGAAG | |
| | CGGCGGCGGTACACCGGCTGGGGCCGGCTGAGCCGGAAGCTGATCAACGGCATCCGGGACAAGC | |
| | AGAGCGGCAAGACCATCCTGGACTTCCTGAAGAGCGACGGCTTCGCCAACCGGAACTTCATGCAGC | |
| | TGATCCACGACGACAGCCTGACCTTCAAGGAGGACATCCAGAAGGCCCAGGTGAGCGGCCAGGGC | |
| | GACAGCCTGCACGAGCACATCGCCAACCTGGCCGGCAGCCCCGCCATCAAGAAGGGCATCCTGCA | |
| | GACCGTGAAGGTGGTGGACGAGCTGGTGAAGGTGATGGGCCGGCACAAGCCCGAGAACATCGTG | |
| | ATCGAGATGGCCCGGGAGAACCAGACCACCCAGAAGGGCCAGAAGAACAGCCGGGAGCGGATGA | |
| | AGCGGATCGAGGAGGGCATCAAGGAGCTGGGCAGCCAGATCCTGAAGGAGCACCCCGTGGAGAA | |
| | CACCCAGCTGCAGAACGAGAAGCTGTACCTGTACTACCTGCAGAACGGCCGGGACATGTACGTGG | |
| | ACCAGGAGCTGGACATCAACCGGCTGAGCGACTACGACGTGGACGCCATCGTGCCCCAGAGCTTCC | |
| | TGAAGGACGACAGCATCGACAACAAGGTGCTGACCCGGAGCGACAAGAACCGGGGCAAGAGCGA | |
| | CAACGTGCCCAGCGAGGAGGTGGTGAAGAAGATGAAGAACTACTGGCGGCAGCTGCTGAACGCC | |
| | AAGCTGATCACCCAGCGGAAGTTCGACAACCTGACCAAGGCCGAGCGGGGCGGCCTGAGCGAGCT | |
| | GGACAAGGCCGGCTTCATCAAGCGGCAGCTGGTGGAGACCCGGCAGATCACCAAGCACGTGGCCC | |
| | AGATCCTGGACAGCCGGATGAACACCAAGTACGACGAGAACGACAAGCTGATCCGGGAGGTGAAG | |
| | GTGATCACCCTGAAGAGCAAGCTGGTGAGCGACTTCCGGAAGGACTTCCAGTTCTACAAGGTGCGG | |
| | GAGATCAACAACTACCACCACGCCCACGACGCCTACCTGAACGCCGTGGTGGGCACCGCCCTGATC | |
| | AAGAAGTACCCCAAGCTGGAGAGCGAGTTCGTGTACGGCGACTACAAGGTGTACGACGTGCGGAA | |
| | GATGATCGCCAAGAGCGAGCAGGAGATCGGCAAGGCCACCGCCAAGTACTTCTTCTACAGCAACAT | |
| | CATGAACTTCTTCAAGACCGAGATCACCCTGGCCAACGGCGAGATCCGGAAGCGGCCCCTGATCGA | |
| | GACCAACGGCGAGACCGGCGAGATCGTGTGGGACAAGGGCCGGGACTTCGCCACCGTGCGGAAG | |
| | GTGCTGAGCATGCCCCAGGTGAACATCGTGAAGAAGACCGAGGTGCAGACCGGCGGCTTCAGCAA | |
| | GGAGAGCATCCTGCCCAAGCGGAACAGCGACAAGCTGATCGCCCGGAAGAAGGACTGGGACCCCA | |
| | AGAAGTACGGCGGCTTCGACAGCCCCACCGTGGCCTACAGCGTGCTGGTGGTGGCCAAGGTGGAG | |
| | AAGGGCAAGAGCAAGAAGCTGAAGAGCGTGAAGGAGCTGCTGGGCATCACCATCATGGAGCGGA | |
| | GCAGCTTCGAGAAGAACCCCATCGACTTCCTGGAGGCCAAGGGCTACAAGGAGGTGAAGAAGGAC | |
| | CTGATCATCAAGCTGCCCAAGTACAGCCTGTTCGAGCTGGAGAACGGCCGGAAGCGGATGCTGGC | |
| | CAGCGCCGGCGAGCTGCAGAAGGGCAACGAGCTGGCCCTGCCCAGCAAGTACGTGAACTTCCTGT | |
| | ACCTGGCCAGCCACTACGAGAAGCTGAAGGGCAGCCCCGAGGACAACGAGCAGAAGCAGCTGTTC | |
| | GTGGAGCAGCACAAGCACTACCTGGACGAGATCATCGAGCAGATCAGCGAGTTCAGCAAGCGGGT | |
| | GATCCTGGCCGACGCCAACCTGGACAAGGTGCTGAGCGCCTACAACAAGCACCGGGACAAGCCCA | |
| | TCCGGGAGCAGGCCGAGAACATCATCCACCTGTTCACCCTGACCAACCTGGGCGCCCCCGCCGCCTT | |
| | CAAGTACTTCGACACCACCATCGACCGGAAGCGGTACACCAGCACCAAGGAGGTGCTGGACGCCAC | |
| | CCTGATCCACCAGAGCATCACCGGCCTGTACGAGACCCGGATCGACCTGAGCCAGCTGGGCGGCG | |
| | ACAGCGGCGGCAAGCGGCCCGCCGCCACCAAGAAGGCCGGCCAGGCCAAGAAGAAGAAGGCTAG | |
| | CGATGCTAAGTCACTGACTGCCTGGTCCCGGACACTGGTGACCTTCAAGGATGTGTTTGTGGACTTC | |
| | ACCAGGGAGGAGTGGAAGCTGCTGGACACTGCTCAGCAGATCCTGTACAGAAATGTGATGCTGGA | |
| | GAACTATAAGAACCTGGTTTCCTTGGGTTATCAGCTTACTAAGCCAGATGTGATCCTCCGGTTGGAG | |
| | AAGGGAGAAGAGCCCTGGCTGGTGGAGAGAGAAATTCACCAAGAGACCCATCCTGATTCAGAGAC | |
| | TGCATTTGAAATCAAATCATCAGTTCCGAAAAAGAAACGCAAAGTTTAG | |
| 1510 | SNHDQEFDPPKVYPPVPAEKRKPIRVLSLFDGIATGLLVLKDLGIQVDRYIASEVCEDSITVGMVRHQGKI | DNMT3A/ |
| | MYVGDVRSVTQKHIQEWGPFDLVIGGSPCNDLSIVNPARKGLYEGTGRLFFEFYRLLHDARPKEGDDRP | L(CRISP |
| | FFWLFENVVAMGVSDKRDISRFLESNPVMIDAKEVSAAHRARYFWGNLPGMNRPLASTVNDKLELQE | ROFF)- |
| | CLEHGRIAKFSKVRTITTRSNSIKQGKDQHFPVFMNEKEDILWCTEMERVFGFPVHYTDVSNMSRLARQ | XTEN80- |
| | RLLGRSWSVPVIRHLFAPLKEYFACVSSGNSNANSRGPSFSSGLVPLSLRGSHMGPMEIYKTVSAWKRQ | dSpCas9- |
| | PVRVLSLFRNIDKVLKSLGFLESGSGSGGGTLKYVEDVTNVVRRDVEKWGPFDLVYGSTQPLGSSCDRCP | KRAB |
| | GWYMFQFHRILQYALPRQESQRPFFWIFMDNLLLTEDDQETTTRFLQTEAVTLQDVRGRDYQNAMRV | (AA) |
| | WSNIPGLKSKHAPLTPKEEEYLQAQVRSRSKLDAPKVDLLVKNCLLPLREYFKYFSQNSLPLGGPSSGAPP | |
| | PSGGSPAGSPTSTEEGTSESATPESGPGTSTEPSEGSAPGSPAGSPTSTEEGTSTEPSEGSAPGTSTEPSEV | |
| | NPKKKRKVGIHGVPAADKKYSIGLAIGTNSVGWAVITDEYKVPSKKFKVLGNTDRHSIKKNLIGALLFDSG | |
| | ETAEATRLKRTARRRYTRRKNRICYLQEIFSNEMAKVDDSFFHRLEESFLVEEDKKHERHPIFGNIVDEVAY | |
| | HEKYPTIYHLRKKLVDSTDKADLRLIYLALAHMIKFRGHFLIEGDLNPDNSDVDKLFIQLVQTYNQLFEENP | |
| | INASGVDAKAILSARLSKSRRLENLIAQLPGEKKNGLFGNLIALSLGLTPNFKSNFDLAEDAKLQLSKDTYD | |
| | DDLDNLLAQIGDQYADLFLAAKNLSDAILLSDILRVNTEITKAPLSASMIKRYDEHHQDLTLLKALVRQQLP | |
| | EKYKEIFFDQSKNGYAGYIDGGASQEEFYKFIKPILEKMDGTEELLVKLNREDLLRKQRTFDNGSIPHQIHL | |
| | GELHAILRRQEDFYPFLKDNREKIEKILTFRIPYYVGPLARGNSRFAWMTRKSEETITPWNFEEVVDKGAS | |
| | AQSFIERMTNFDKNLPNEKVLPKHSLLYEYFTVYNELTKVKYVTEGMRKPAFLSGEQKKAIVDLLFKTNRK | |
| | VTVKQLKEDYFKKIECFDSVEISGVEDRFNASLGTYHDLLKIIKDKDFLDNEENEDILEDIVLTLTLFEDREMI | |
| | EERLKTYAHLFDDKVMKQLKRRRYTGWGRLSRKLINGIRDKQSGKTILDFLKSDGFANRNFMQLIHDDSL | |
| | TFKEDIQKAQVSGQGDSLHEHIANLAGSPAIKKGILQTVKVVDELVKVMGRHKPENIVIEMARENQTTQ | |
| | KGQKNSRERMKRIEEGIKELGSQILKEHPVENTQLQNEKLYLYYLQNGRDMYVDQELDINRLSDYDVDAI | |
| | VPQSFLKDDSIDNKVLTRSDKNRGKSDNVPSEEVVKKMKNYWRQLLNAKLITQRKFDNLTKAERGGLSE | |
| | LDKAGFIKRQLVETRQITKHVAQILDSRMNTKYDENDKLIREVKVITLKSKLVSDFRKDFQFYKVREINNYH | |
| | HAHDAYLNAVVGTALIKKYPKLESEFVYGDYKVYDVRKMIAKSEQEIGKATAKYFFYSNIMNFFKTEITLA | |
| | NGEIRKRPLIETNGETGEIVWDKGRDFATVRKVLSMPQVNIVKKTEVQTGGFSKESILPKRNSDKLIARKK | |
| | DWDPKKYGGFDSPTVAYSVLVVAKVEKGKSKKLKSVKELLGITIMERSSFEKNPIDFLEAKGYKEVKKDLII | |
| | KLPKYSLFELENGRKRMLASAGELQKGNELALPSKYVNFLYLASHYEKLKGSPEDNEQKQLFVEQHKHYL | |
| | DEIIEQISEFSKRVILADANLDKVLSAYNKHRDKPIREQAENIIHLFTLTNLGAPAAFKYFDTTIDRKRYTSTK | |
| | EVLDATLIHQSITGLYETRIDLSQLGGDSGGKRPAATKKAGQAKKKKASDAKSLTAWSRTLVTFKDVFVD | |
| | FTREEWKLLDTAQQILYRNVMLENYKNLVSLGYQLTKPDVILRLEKGEEPWLVEREIHQETHPDSETAFEI | |
| | KSSVPKKKRKV | |
| 1511 | NHDQEFDPPKVYPPVPAEKRKPIRVLSLFDGIATGLLVLKDLGIQVDRYIASEVCEDSITVGMVRHQGKIM | DNMT3A/ |
| | YVGDVRSVTQKHIQEWGPFDLVIGGSPCNDLSIVNPARKGLYEGTGRLFFEFYRLLHDARPKEGDDRPFF | L (AA) |
| | WLFENVVAMGVSDKRDISRFLESNPVMIDAKEVSAAHRARYFWGNLPGMNRPLASTVNDKLELQECL | |
| | EHGRIAKFSKVRTITTRSNSIKQGKDQHFPVFMNEKEDILWCTEMERVFGFPVHYTDVSNMSRLARQRL | |
| | LGRSWSVPVIRHLFAPLKEYFACVSSGNSNANSRGPSFSSGLVPLSLRGSHMGPMEIYKTVSAWKRQPV | |
| | RVLSLFRNIDKVLKSLGFLESGSGSGGGTLKYVEDVTNVVRRDVEKWGPFDLVYGSTQPLGSSCDRCPG | |
| | WYMFQFHRILQYALPRQESQRPFFWIFMDNLLLTEDDQETTTRFLQTEAVTLQDVRGRDYQNAMRV | |
| | WSNIPGLKSKHAPLTPKEEEYLQAQVRSRSKLDAPKVDLLVKNCLLPLREYFKYFSQNSLPL | |
| 1512 | ATGGCGGCCATCCCAGCCCTGGACCCAGAGGCCGAGCCCAGCATGGACGTGATTTTGGTGGGATCC | DNMT3L |
| | AGTGAGCTCTCAAGCTCCGTTTCACCCGGGACAGGCAGAGATCTTATTGCATATGAAGTCAAGGCT | (nt) |
| | AACCAGCGAAATATAGAAGACATCTGCATCTGCTGCGGAAGTCTCCAGGTTCACACACAGCACCCT | |
| | CTGTTTGAGGGAGGGATCTGCGCCCCATGTAAGGACAAGTTCCTGGATGCCCTCTTCCTGTACGAC | |
| | GATGACGGGTACCAATCCTACTGCTCCATCTGCTGCTCCGGAGAAACGCTGCTCATCTGCGGAAACC | |
| | CTGATTGCACCCGATGCTACTGCTTCGAGTGTGTGGATAGCCTGGTCGGCCCCGGGACCTCGGGGA | |
| | AGGTGCACGCCATGAGCAACTGGGTGTGCTACCTGTGCCTGCCGTCCTCCCGAAGCGGGCTGCTGC | |
| | AGCGTCGGAGGAAGTGGCGCAGCCAGCTCAAGGCCTTCTACGACCGAGAGTCGGAGAATCCCCTT | |
| | GAGATGTTCGAAACCGTGCCTGTGTGGAGGAGACAGCCAGTCCGGGTGCTGTCCCTTTTTGAAGAC | |
| | ATCAAGAAAGAGCTGACGAGTTTGGGCTTTTTGGAAAGTGGTTCTGACCCGGGACAACTGAAGCAT | |
| | GTGGTTGATGTCACAGACACAGTGAGGAAGGATGTGGAGGAGTGGGGACCCTTCGATCTTGTGTA | |
| | CGGCGCCACACCTCCCCTGGGCCACACCTGTGACCGTCCTCCCAGCTGGTACCTGTTCCAGTTCCAC | |
| | CGGCTCCTGCAGTACGCACGGCCCAAGCCAGGCAGCCCCAGGCCCTTCTTCTGGATGTTCGTGGAC | |
| | AATCTGGTGCTGAACAAGGAAGACCTGGACGTCGCATCTCGCTTCCTGGAGATGGAGCCAGTCACC | |
| | ATCCCAGATGTCCACGGCGGATCCTTGCAGAATGCTGTCCGCGTGTGGAGCAACATCCCAGCCATA | |
| | AGGAGCAGGCACTGGGCTCTGGTTTCGGAAGAAGAATTGTCCCTGCTGGCCCAGAACAAGCAGAG | |
| | CTCGAAGCTCGCGGCCAAGTGGCCCACCAAGCTGGTGAAGAACTGCTTTCTCCCCCTAAGAGAATA | |
| | TTTCAAGTATTTTTCAACAGAACTCACTTCCTCTTTA | |
| 1513 | ACCTACGGGCTGCTGCGGCGGCGAGAGGACTGGCCCTCCCGGCTCCAGATGTTCTTCGCTAATAAC | DNMT3A |
| | CACGACCAGGAATTTGACCCTCCAAAGGTTTACCCACCTGTCCCAGCTGAGAAGAGGAAGCCCATC | (nt) |
| | CGGGTGCTGTCTCTCTTTGATGGAATCGCTACAGGGCTCCTGGTGCTGAAGGACTTGGGCATTCAG | |
| | GTGGACCGCTACATTGCCTCGGAGGTGTGTGAGGACTCCATCACGGTGGGCATGGTGCGGCACCA | |
| | GGGGAAGATCATGTACGTCGGGGACGTCCGCAGCGTCACACAGAAGCATATCCAGGAGTGGGGCC | |
| | CATTCGATCTGGTGATTGGGGGCAGTCCCTGCAATGACCTCTCCATCGTCAACCCTGCTCGCAAGGG | |
| | CCTCTACGAGGGCACTGGCCGGCTCTTCTTTGAGTTCTACCGCCTCCTGCATGATGCGCGGCCCAAG | |
| | GAGGGAGATGATCGCCCCTTCTTCTGGCTCTTTGAGAATGTGGTGGCCATGGGCGTTAGTGACAAG | |
| | AGGGACATCTCGCGATTTCTCGAGTCCAACCCTGTGATGATTGATGCCAAAGAAGTGTCAGCTGCA | |
| | CACAGGGCCCGCTACTTCTGGGGTAACCTTCCCGGTATGAACAGGCCGTTGGCATCCACTGTGAAT | |
| | GATAAGCTGGAGCTGCAGGAGTGTCTGGAGCATGGCAGGATAGCCAAGTTCAGCAAAGTGAGGAC | |
| | CATTACTACGAGGTCAAACTCCATAAAGCAGGGCAAAGACCAGCATTTTCCTGTCTTCATGAATGAG | |
| | AAAGAGGACATCTTATGGTGCACTGAAATGGAAAGGGTATTTGGTTTCCCAGTCCACTATACTGAC | |
| | GTATCCAACATGAGCCGCTTGGCGAGGCAGAGACTGCTGGGCCGGTCATGGAGCGTGCCAGTCAT | |
| | CCGCCACCTCTTCGCTCCGCTGAAGGAGTATTTTGCGTGTGTG | |
| 1514 | TYGLLRRREDWPSRLQMFFANNHDQEFDPPKVYPPVPAEKRKPIRVLSLFDGIATGLLVLKDLGIQVDRY | DNMT3A |
| | IASEVCEDSITVGMVRHQGKIMYVGDVRSVTQKHIQEWGPFDLVIGGSPCNDLSIVNPARKGLYEGTGR | (AA) |
| | LFFEFYRLLHDARPKEGDDRPFFWLFENVVAMGVSDKRDISRFLESNPVMIDAKEVSAAHRARYFWGN | |
| | LPGMNRPLASTVNDKLELQECLEHGRIAKFSKVRTITTRSNSIKQGKDQHFPVFMNEKEDILWCTEMER | |
| | VFGFPVHYTDVSNMSRLARQRLLGRSWSVPVIRHLFAPLKEYFACV | |
| 1515 | AACCATGACCAGGAATTTGACCCCCCAAAGGTTTACCCACCTGTGCCAGCTGAGAAGAGGAAGCCC | DNMT3A/ |
| | ATCCGCGTGCTGTCTCTCTTTGATGGGATTGCTACAGGGCTCCTGGTGCTGAAGGACCTGGGCATCC | L v1 (nt) |
| | AAGTGGACCGCTACATTGCCTCCGAGGTGTGTGAGGACTCCATCACGGTGGGCATGGTGCGGCACC | |
| | AGGGAAAGATCATGTACGTCGGGGACGTCCGCAGCGTCACACAGAAGCATATCCAGGAGTGGGGC | |
| | CCATTCGACCTGGTGATTGGAGGCAGTCCCTGCAATGACCTCTCCATTGTCAACCCTGCCCGCAAGG | |
| | GACTTTATGAGGGTACTGGCCGCCTCTTCTTTGAGTTCTACCGCCTCCTGCATGATGCGCGGCCCAA | |
| | GGAGGGAGATGATCGCCCCTTCTTCTGGCTCTTTGAGAATGTGGTGGCCATGGGCGTTAGTGACAA | |
| | GAGGGACATCTCGCGATTTCTTGAGTCTAACCCCGTGATGATTGACGCCAAAGAAGTGTCTGCTGC | |
| | ACACAGGGCCCGTTACTTCTGGGGTAACCTTCCTGGCATGAACAGGCCTTTGGCATCCACTGTGAAT | |
| | GATAAGCTGGAGCTGCAAGAGTGTCTGGAGCACGGCAGAATAGCCAAGTTCAGCAAAGTGAGGAC | |
| | CATTACCACCAGGTCAAACTCTATAAAGCAGGGCAAAGACCAGCATTTCCCCGTCTTCATGAACGAG | |
| | AAGGAGGACATCCTGTGGTGCACTGAAATGGAAAGGGTGTTTGGCTTCCCCGTCCACTACACAGAC | |
| | GTCTCCAACATGAGCCGCTTGGCGAGGCAGAGACTGCTGGGCCGATCGTGGAGCGTGCCGGTCAT | |
| | CCGCCACCTCTTCGCTCCGCTGAAGGAATATTTTGCTTGTGTGTCTAGCGGCAATAGTAACGCTAAC | |
| | AGCCGCGGGCCGAGCTTCAGCAGCGGCCTGGTGCCGTTAAGCTTGCGCGGCAGCCATATGGGCCC | |
| | TATGGAGATATACAAGACAGTGTCTGCATGGAAGAGACAGCCAGTGCGGGTACTGAGCCTCTTCAG | |
| | AAACATCGACAAGGTACTAAAGAGTTTGGGCTTCTTGGAAAGCGGTTCTGGTTCTGGGGGAGGAA | |
| | CGCTGAAGTACGTGGAAGATGTCACAAATGTCGTGAGGAGAGACGTGGAGAAATGGGGCCCCTTT | |
| | GACCTGGTGTACGGCTCGACGCAGCCCCTAGGCAGCTCTTGTGATCGCTGTCCCGGCTGGTACATG | |
| | TTCCAGTTCCACCGGATCCTGCAGTATGCGCTGCCTCGCCAGGAGAGTCAGCGGCCCTTCTTCTGGA | |
| | TATTCATGGACAATCTGCTGCTGACTGAGGATGACCAAGAGACAACTACCCGCTTCCTTCAGACAGA | |
| | GGCTGTGACCCTCCAGGATGTCCGTGGCAGAGACTACCAGAATGCTATGCGGGTGTGGAGCAACA | |
| | TTCCAGGGCTGAAGAGCAAGCATGCGCCCCTGACCCCAAAGGAAGAAGAGTATCTGCAAGCCCAA | |
| | GTCAGAAGCAGGAGCAAGCTGGACGCCCCGAAAGTTGACCTCCTGGTGAAGAACTGCCTTCTCCCG | |
| | CTGAGAGAGTACTTCAAGTATTTTTCTCAAAACTCACTTCCTCTT | |
| 1516 | AACCACGATCAGGAGTTTGACCCCCCTAAGGTGTACCCACCCGTGCCAGCCGAGAAGAGGAAGCCC | DNMT3A/ |
| | ATCCGCGTGCTGTCCCTGTTCGACGGCATCGCCACAGGCCTGCTGGTGCTGAAGGATCTGGGCATC | L v2 (nt) |
| | CAGGTGGACAGATATATCGCCTCCGAGGTGTGCGAGGATTCTATCACCGTGGGCATGGTGAGGCA | |
| | CCAGGGCAAGATCATGTACGTGGGCGACGTGCGCAGCGTGACACAGAAGCACATCCAGGAGTGG | |
| | GGACCCTTCGACCTGGTCATCGGAGGCAGCCCCTGTAATGACCTGTCCATCGTGAACCCTGCAAGG | |
| | AAGGGCCTGTATGAGGGAACCGGCAGACTGTTCTTTGAGTTCTACAGGCTGCTGCACGACGCCCGC | |
| | CCTAAGGAGGGCGATGACAGGCCATTCTTTTGGCTGTTTGAGAACGTGGTGGCCATGGGCGTGAG | |
| | CGACAAGCGGGATATCTCCAGATTCCTGGAGTCTAATCCCGTGATGATCGATGCAAAGGAGGTGTC | |
| | TGCCGCACACAGGGCAAGGTACTTTTGGGGAAATCTGCCTGGCATGAACCGCCCACTGGCCAGCAC | |
| | CGTGAACGACAAGCTGGAGCTGCAGGAGTGCCTGGAGCACGGAAGGATCGCCAAGTTCTCCAAGG | |
| | TGCGGACAATCACCACAAGATCTAACAGCATCAAGCAGGGCAAGGATCAGCACTTCCCCGTGTTCA | |
| | TGAATGAGAAGGAGGACATCCTGTGGTGTACCGAGATGGAGCGCGTGTTCGGCTTTCCAGTGCACT | |
| | ATACAGACGTGAGCAATATGAGCCGGCTGGCAAGGCAGAGACTGCTGGGCCGGTCCTGGTCTGTG | |
| | CCAGTGATCAGACACCTGTTCGCCCCCCTGAAGGAGTACTTTGCCTGCGTGTCTAGCGGCAACTCTA | |
| | ATGCCAACAGCAGAGGCCCTTCCTTTTCCTCTGGCCTGGTGCCACTGTCTCTGAGGGGCAGCCACAT | |
| | GGGCCCCATGGAGATCTACAAGACCGTGTCCGCCTGGAAGAGGCAGCCTGTGCGCGTGCTGTCTCT | |
| | GTTCCGCAACATCGACAAGGTGCTGAAGAGCCTGGGCTTTCTGGAGAGCGGATCCGGATCTGGAG | |
| | GAGGCACCCTGAAGTATGTGGAGGATGTGACAAATGTGGTGCGGAGAGATGTGGAGAAGTGGGG | |
| | CCCCTTCGATCTGGTGTACGGATCCACCCAGCCACTGGGAAGCTCCTGCGATAGGTGTCCAGGATG | |
| | GTATATGTTCCAGTTTCACAGAATCCTGCAGTACGCACTGCCAAGGCAGGAGAGCCAGCGCCCTTTC | |
| | TTTTGGATCTTTATGGACAACCTGCTGCTGACAGAGGATGACCAGGAGACAACAACCCGCTTCCTGC | |
| | AGACAGAGGCAGTGACCCTGCAGGATGTGAGGGGACGCGACTATCAGAATGCCATGCGGGTGTG | |
| | GTCTAACATCCCTGGCCTGAAGAGCAAGCACGCCCCCCTGACCCCTAAGGAGGAGGAGTACCTGCA | |
| | GGCCCAGGTGCGGAGCAGATCCAAGCTGGATGCCCCTAAGGTGGACCTGCTGGTGAAGAATTGTC | |
| | TGCTGCCACTGCGGGAGTACTTCAAGTACTTTAGTCAGAATAGCCTGCCACTG | |
| 1517 | MGPMEIYKTVSAWKRQPVRVLSLFRNIDKVLKSLGFLESGSGSGGGTLKYVEDVTNVVRRDVEKWGPF | Murine |
| | DLVYGSTQPLGSSCDRCPGWYMFQFHRILQYALPRQESQRPFFWIFMDNLLLTEDDQETTTRFLQTEAV | DNMT3L |
| | TLQDVRGRDYQNAMRVWSNIPGLKSKHAPLTPKEEEYLQAQVRSRSKLDAPKVDLLVKNCLLPLREYFK | |
| | YFSQNSLPL | |
| 1518 | NHDQEFDPPKVYPPVPAEKRKPIRVLSLFDGIATGLLVLKDLGIQVDRYIASEVCEDSITVGMVRHQGKIM | Human |
| | YVGDVRSVTQKHIQEWGPFDLVIGGSPCNDLSIVNPARKGLYEGTGRLFFEFYRLLHDARPKEGDDRPFF | DNMT3A |
| | WLFENVVAMGVSDKRDISRFLESNPVMIDAKEVSAAHRARYFWGNLPGMNRPLASTVNDKLELQECL | |
| | EHGRIAKFSKVRTITTRSNSIKQGKDQHFPVFMNEKEDILWCTEMERVFGFPVHYTDVSNMSRLARQRL | |
| | LGRSWSVPVIRHLFAPLKEYFACV | |
| 1519 | NPLEMFE | C- |
| | TVPVWRRQPVRVLSLFEDIKKELTSLGFLESGSDPGQLKHVVDVTDTVRKDVEEWGPFDL | terminal |
| | VYGATPPLGHTCDRPPSWYLFQFHRLLQYARPKPGSPRPFFWMFVDNLVLNKEDLDVASR | human |
| | FLEMEPVTIPDVHGGSLQNAVRVWSNIPAIRSRHWALVSEEELSLLAQNKQSSKLAAKWP | DNMT3L |
| | TKLVKNCFLPLREYFKYFSTELTSSL | |
| 1520 | SSGNSNANSRGPSFSSGLVPLSLRGSH | Linker |
| 1521 | MGSRETPSSCSKTLETLDLETSDSSSPDADSPLEEQWLKSSPALKEDSVDVVLEDCKEPL | Murine |
| | SPSSPPTGREMIRYEVKVNRRSIEDICLCCGTLQVYTRHPLFEGGLCAPCKDKFLESLFL | DNMT3L |
| | YDDDGHQSYCTICCSGGTLFICESPDCTRCYCFECVDILVGPGTSERINAMACWVCFLCL | |
| | PFSRSGLLQRRKRWRHQLKAFHDQEGAGPMEIYKTVSAWKRQPVRVLSLFRNIDKVLKSL | |
| | GFLESGSGSGGGTLKYVEDVTNVVRRDVEKWGPFDLVYGSTQPLGSSCDRCPGWYMFQFH | |
| | RILQYALPRQESQRPFFWIFMDNLLLTEDDQETTTRFLQTEAVTLQDVRGRDYQNAMRVW | |
| | SNIPGLKSKHAPLTPKEEEYLQAQVRSRSKLDAPKVDLLVKNCLLPLREYFKYFSQNSLP | |
| | L | |

1. An epigenetic-modifying DNA-targeting system,
said DNA-targeting system comprising a fusion protein comprising:
(a) a DNA-targeting domain capable of being targeted to a target site in a gene or regulatory DNA element thereof in a T cell; and
(b) at least one effector domain capable of reducing transcription of the gene;
wherein reduced transcription of the gene promotes a stem cell-like memory T-cell phenotype.

2. The epigenetic-modifying DNA-targeting system of claim 1, wherein the DNA-targeting system is not able to introduce a genetic disruption or a DNA break at or near the target site.

3. The epigenetic-modifying DNA-targeting system of claim 1 or claim 2, wherein the DNA-targeting domain comprises a Clustered Regularly Interspaced Short Palindromic Repeats associated (Cas)-guide RNA (gRNA) combination comprising (a) a Cas protein or a variant thereof and (b) at least one gRNA; a zinc finger protein (ZFP); a transcription activator-like effector (TALE); a meganuclease; a homing endonuclease; or an I-SceI enzyme or a variant thereof, optionally wherein the DNA-targeting domain comprises a catalytically inactive variant of any of the foregoing.

4. The epigenetic-modifying DNA-targeting system of any of claims 1-3, wherein the DNA-targeting domain comprises a Cas-gRNA combination comprising (a) a Cas protein or a variant thereof and (b) at least one gRNA.

5. An epigenetic-modifying DNA-targeting system,
said DNA-targeting system comprising:
(a) a fusion protein comprising a Clustered Regularly Interspaced Short Palindromic Repeats associated (Cas) protein or variant thereof and at least one effector domain capable of reducing transcription of a gene is a T cell; and
(b) at least one gRNA that targets the Cas protein or variant thereof of the fusion protein to a target site in the gene or regulatory DNA element thereof,
wherein reduced transcription of the gene promotes a stem cell-like memory T-cell phenotype.

6. The epigenetic-modifying DNA-targeting system of any of claims 1-5, wherein the stem cell-like memory T cell phenotype comprises one or more cell-surface markers selected from CCR7+, CD27+, CD45RA+, CD45RO−, CCR7+, CD62L+, CD28+, CD27+, IL-7Rα+, CXCR3+, CD95+, CD11a+, IL-2Rβ+, CD58+, and CD57−, or combinations thereof.

7. The epigenetic-modifying DNA-targeting system of any of claims 1-6, wherein the stem cell-like memory T cell phenotype comprises expression of CCR7 and/or CD27.

8. The epigenetic-modifying DNA-targeting system of any of claims 1-7, wherein the stem cell-like memory T cell phenotype comprises expression of CCR7 and CD27.

9. The epigenetic-modifying DNA-targeting system of any of claims 1-8, wherein the stem cell-like memory T cell phenotype is characterized by polyfunctional activity of the T cells to produce two or more cytokines following stimulation of the T cell with a stimulatory agent, optionally wherein the two or more cytokines are selected from among interferon-gamma (IFN-gamma), interleukin 2 (IL-2), and TNF-alpha.

10. The epigenetic-modifying DNA-targeting system of any of claims 3-9, wherein at least one gRNA is capable of complexing with the Cas protein or variant thereof, and targeting the Cas protein or the variant thereof to the target site.

11. The epigenetic-modifying DNA-targeting system of any of claims 3-10, wherein the at least one gRNA comprises a gRNA spacer sequence that is capable of hybridizing to the target site or is complementary to the target site.

12. The epigenetic-modifying DNA-targeting system of any of claims 3-11, wherein the Cas protein or a variant thereof is a Cas9 protein or a variant thereof.

13. The epigenetic-modifying DNA-targeting system of any of claims 3-11, wherein the Cas protein or a variant thereof is a Cas12 protein or a variant thereof.

14. The epigenetic-modifying DNA-targeting system of any of claims 3-12, wherein the Cas protein or a variant thereof is a variant Cas protein, wherein the variant Cas protein lacks nuclease activity or is a deactivated Cas (dCas) protein.

15. The epigenetic-modifying DNA-targeting system of claim 14, wherein the variant Cas protein is a variant Cas9 protein that lacks nuclease activity or that is a deactivated Cas9 (dCas9) protein.

16. The epigenetic-modifying DNA-targeting system of claim 12, wherein the Cas9 protein or a variant thereof is a Staphylococcus aureus Cas9 (SaCas9) protein or a variant thereof.

17. The epigenetic-modifying DNA-targeting system of claim 15, wherein the variant Cas9 is a Staphylococcus aureus dCas9 protein (dSaCas9) that comprises at least one amino acid mutation selected from D10A and N580A, with reference to numbering of positions of SEQ ID NO: 1461.

18. The epigenetic-modifying DNA-targeting system of claim 15 or claim 17, wherein the variant Cas9 protein comprises the sequence set forth in SEQ ID NO: 1462, or an amino acid sequence that has at least 90%, 91%, 92%, 93%, 94%, 95%, 96%, 97%, 98%, or 99% sequence identity thereto.

19. The epigenetic-modifying DNA-targeting system of claim 12, wherein the Cas9 protein or variant thereof is a Streptococcus pyogenes Cas9 (SpCas9) protein or a variant thereof.

20. The epigenetic-modifying DNA-targeting system of any of claim 15, wherein the variant Cas9 is a Streptococcus pyogenes dCas9 (dSpCas9) protein that comprises at least one amino acid mutation selected from D10A and H840A, with reference to numbering of positions of SEQ ID NO: 1463.

21. The epigenetic-modifying DNA-targeting system of claim 15 or claim 20, wherein the variant Cas9 protein comprises the sequence set forth in SEQ ID NO: 1464, or an amino acid sequence that has at least 90%, 91%, 92%, 93%, 94%, 95%, 96%, 97%, 98%, or 99% sequence identity thereto.

22. The epigenetic-modifying DNA-targeting system of any of claims 1-21, wherein the regulatory DNA element is an enhancer or a promoter.

23. The epigenetic-modifying DNA-targeting system of any of claims 1-22, wherein the gene is a DNA-binding gene.

24. The DNA-targeting system of any of claims 1-23, wherein the gene is selected from the list consisting of: BMP4, E2F7, ESRRG, LYL1, STAT5A, THAP10, ZNF362, ZSCAN1, ANHX, CPEB1, CSRNP1, EN2, EPAS1, IRX3, LHX8, NR5A2, PRDM16, RAX2, SCML4, SMAD1, SOX6, SUV39H1, TFDP1, ZNF287, ZNF438, ZNF681, ZNF853, BMP4, CARF, ESRRG, ESRRG, FOXR2, HOXA7, IRF9, KAT5, KLF5, NEUROD1, PAX6, PIN1, PURG, RARA, SNAPC5, STAT5A, TBX22, WT1, ZNF138, ZNF143, ZNF205, ZNF235, ZNF526, ZNF548, ZNF559, ZNF611, ZNF655, ZNF672, ZNF699, ZNF706, ZNF714, ZNF772, ZNF782, ZSCAN1, ZSCAN26, ADNP, AHRR, AKNA, ALX3, ALX4, AR, ARHGAP35, ARID3C, ARID5B, ASCL5, ATF6B, ATOH7, BARHL1, BARHL2, BATF, BBX, BHLHE40, BNC2, BRD4, BRD9, BSX, CCDC17, CDX1, CDX2, CDX4, CEBPB, CENPB, CLOCK, CREB3, CREB3L4, CSRNP3, CTCF, CUX1, CUX2, DACH2, DLX1, DLX4, DLX5, DLX6, DMRTB1, DNMT3B, DOTIL, DPF1, DR1, E2F2, E2F3, EBF3, EGR2, EHF, ELF5, ELMSAN1, EMX1, ETS2, ETV4, ETV4, ETV6, EZH1, FERD3L, FERD3L, FIZ1, FOS, FOSB, FOXA1, FOXA2, FOXA3, FOXC2, FOXD3, FOXE1, FOXJ3, FOXN2, FOXN4, FOXO1, FOXP3, FOXS1, GATA2, GATA3, GATAD2A, GCM2, GFI1, GLI2, GLYR1, GPBP1L1, GRHL1, GTF2B, GTF2I, HDAC2, HES2, HES7, HESX1, HEY1, HIF3A, HIVEP3, HLF, HLX, HMG20A, HMGA2, HMGN3, HMX2, HNF1A, HNF4G, HOXA1, HOXA11, HOXB1, HOXB2, HOXB3, HOXC12, HOXC9, HOXC9, HOXD9, HSF4, HSF5, IKZF1, IKZF2, IKZF3, IKZF4, IRF7, IRX3, ISL2, JRK, JRKL, KAT7, KDM1A, KDM2B, KDM5D, KLF14, KLF9, KMT2B, L3MBTL4, LEF1, LHX6, LHX9, LIN28A, LIN28A, LMX1A, MAF, MAFF, MBD3, MBD4, MBNL2, MED1, MED14, MED23, MED24, MEF2C, MEF2D, MEIS3, MESP1, MGA, MITF, MLX, MNX1, MYF5, MYOG, MYPOP, MYRFL, MYT1L, NCOR1, NEUROG1, NFAT5, NFATC2, NFATC3, NFE2L1, NFE2L3, NFIA, NFYB, NKX1-2, NKX2-3, NKX2-4, NKX2-5, NOTCH3, NOTO, NR1H2, NR1H4, NR112, NR2C2, NR2F1, OSR2, OTX1, OVOL1, PA2G4, PATZ1, PAX9, PAX9, PBX4, PGR, PITX1, PITX3, POU2F2, POU3F1, POU3F2, POU3F3, POU5F1, PRDM1, PRDM7, PRR12, PRRX1, RBCK1, RHOXF1, RUNX2, SALL3, SIM1, SIX1, SIX6, SKI, SKIL, SKOR1, SMAD2, SMAD5, SMYD3, SNAPC2, SOX1, SOX14, SOX30, SOX5, SOX6, SP2, SP3, SP5, SP8, SP9, SPIB, STAT5B, T, TBPL1, TBX5, TBX6, TCF12, TCF23, TCF3, TFAP2A, TFAP2E, TFDP2, TFDP3, TGIF2, TGIF2LX, THAP6, THRA, TIGD1, TIGD3, TIGD5, TLX3, TOX, TOX2, TRIM27, TRIM27, TRIM40, TRIM52, TSHZ2, VAX1, VEGFA, VSX1, WNT1, WNT3A, YBX1, YY1, YY2, ZBED5, ZBTB2, ZBTB21, ZBTB38, ZBTB4, ZBTB40, ZBTB42, ZBTB49, ZBTB7B, ZBTB7C, ZBTB8B, ZBTB9, ZC3H8, ZEB2, ZFHX2, ZFHX3, ZFP28, ZFP41, ZFP69B, ZFP90, ZGLP1, ZHX3, ZIC5, ZKSCAN1, ZKSCAN2, ZKSCAN7, ZNF107, ZNF121, ZNF132, ZNF135, ZNF140, ZNF141, ZNF222, ZNF225, ZNF229, ZNF230, ZNF248, ZNF25, ZNF26, ZNF267, ZNF280C, ZNF281, ZNF283, ZNF286B, ZNF304, ZNF317, ZNF318, ZNF320, ZNF33B, ZNF346, ZNF358, ZNF367, ZNF382, ZNF383, ZNF385B, ZNF391, ZNF415, ZNF423, ZNF43, ZNF432, ZNF433, ZNF436, ZNF441, ZNF443, ZNF461, ZNF462, ZNF468, ZNF473, ZNF483, ZNF486, ZNF491, ZNF507, ZNF514, ZNF519, ZNF540, ZNF543, ZNF546, ZNF549, ZNF555, ZNF562, ZNF567, ZNF569, ZNF574, ZNF577, ZNF596, ZNF610, ZNF616, ZNF621, ZNF626, ZNF627, ZNF629, ZNF630, ZNF630, ZNF641, ZNF645, ZNF658, ZNF660, ZNF662, ZNF677, ZNF682, ZNF697, ZNF703, ZNF705A, ZNF705B, ZNF705G, ZNF716, ZNF729, ZNF750, ZNF75A, ZNF765, ZNF771, ZNF773, ZNF774, ZNF778, ZNF784, ZNF789, ZNF804B, ZNF816, ZNF823, ZNF83, ZNF831, ZNF846, ZNF852, ZNF879, ZNF91, ZNF93, ZNF99, ZNF99, ZSCAN16, ZSCAN2, ZSCAN21, ZSCAN5A, and ZSCAN5B.

25. The epigenetic-modifying DNA-targeting system of any of claims 1-24, wherein the target site comprises the sequence set forth in any one of SEQ ID NOS: 1-484, a contiguous portion thereof of at least 14 nucleotides (nt), or a complementary sequence of any of the foregoing.

26. The epigenetic-modifying DNA-targeting system of any of claims 3-25, wherein the at least one gRNA comprises a gRNA spacer sequence comprising the sequence set forth in SEQ ID NO: 485-968, or a contiguous portion thereof of at least 14 nt.

27. The epigenetic-modifying DNA-targeting system of claim 26, wherein the at least one gRNA further comprises the sequence set forth in SEQ ID NO: 1454.

28. The epigenetic-modifying DNA-targeting system of any of claims 3-27, wherein the at least one gRNA comprises a gRNA that comprises the sequence set forth in any one of SEQ ID NOS: 969-1452, optionally wherein the at least one gRNA is the gRNA set forth in any one of SEQ ID NOS: 969-1452.

29. The epigenetic-modifying DNA-targeting system of any of claims 1-24, wherein the gene is selected from the list consisting of: BMP4, E2F7, ESRRG, LYL1, STAT5A, THAP10, ZNF362, ZSCAN1, ANHX, CPEB1, CSRNP1, EN2, EPAS1, IRX3, LHX8, NR5A2, PRDM16, RAX2, SCML4, SMAD1, SOX6, SUV39H1, TFDP1, ZNF287, ZNF438, ZNF681, and ZNF853.

30. The epigenetic-modifying DNA-targeting system of any of claims 1-24 and 29, wherein the target site comprises the sequence set forth in any one of SEQ ID NOS: 1-27, a contiguous portion thereof of at least 14 nucleotides (nt), or a complementary sequence of any of the foregoing.

31. The epigenetic-modifying DNA-targeting system of any of claims 3-24, 29 and 30, wherein the at least one gRNA comprises a gRNA spacer sequence comprising the sequence set forth in SEQ ID NO: 485-511, or a contiguous portion thereof of at least 14 nt.

32. The epigenetic-modifying DNA-targeting system of claim 31, wherein the at least one gRNA further comprises the sequence set forth in SEQ ID NO: 1454.

33. The epigenetic-modifying DNA-targeting system of any of claims 3-24 and 29-32, wherein the at least one gRNA comprises a gRNA that comprises the sequence set forth in any one of SEQ ID NOS: 969-995, optionally wherein the at least one gRNA is the gRNA set forth in any one of SEQ ID NOS: 969-995.

34. The epigenetic-modifying DNA-targeting system of any of claims 1-24, wherein the gene is selected from the list consisting of: BMP4, E2F7, ESRRG, LYL1, STAT5A, THAP10, ZNF362, and ZSCAN1.

35. The DNA-targeting system of any of claims 1-24 and 34, wherein the target site comprises the sequence set forth in any one of SEQ ID NOS: 1-8, a contiguous portion thereof of at least 14 nucleotides (nt), or a complementary sequence of any of the foregoing.

36. The DNA-targeting system of any of claims 3-24, 34 and 35, wherein the at least one gRNA comprises a gRNA spacer sequence comprising the sequence set forth in SEQ ID NO: 485-492, or a contiguous portion thereof of at least 14 nt.

37. The DNA-targeting system of claim 36, wherein the at least one gRNA further comprises the sequence set forth in SEQ ID NO: 1454.

38. The DNA-targeting system of any of claims 3-24 and 34-37, wherein the at least one gRNA comprises a gRNA that comprises the sequence set forth in any one of SEQ ID NOS: 969-976, optionally wherein the at least one gRNA is the gRNA set forth in any one of SEQ ID NOS: 969-976.

39. The DNA-targeting system of any of claims 3-38, wherein the gRNA spacer sequence is between 14 nt and 24 nt, or between 16 nt and 22 nt in length.

40. The DNA-targeting system of any of claims 3-39, wherein the gRNA spacer sequence is 18 nt, 19 nt, 20 nt, 21 nt or 22 nt in length.

41. The DNA-targeting system of any of claims 3-40, wherein the gRNA comprises modified nucleotides for increased stability.

42. The DNA-targeting system of any of claims 1-32, wherein the at least one effector domain induces, catalyzes, or leads to transcription repression, transcription co-repression, or reduced transcription of the gene.

43. The DNA-targeting system of any of claims 1-42, wherein the at least one effector domain induces transcription repression.

44. The DNA-targeting system of any of claims 1-43, wherein the at least one effector domain comprises a KRAB domain or a variant thereof.

45. The DNA-targeting system of any of claims 1-44, wherein the at least one effector domain comprises the sequence set forth in SEQ ID NO: 1465, a portion thereof, or an amino acid sequence that has at least 90%, 91%, 92%, 93%, 94%, 95%, 96%, 97%, 98%, or 99% sequence identity to any of the foregoing.

46. The DNA-targeting system of any of claims 1-35, wherein at least one effector domain is selected from a ERF repressor domain, Mxi1 repressor domain, SID4X repressor domain, Mad-SID repressor domain. LSD1 repressor domain, or DNMT3A, DNMT3A/3L, DNMT3B domain binding protein or LSD1 repressor domain, or variant of any of the foregoing.

47. The DNA-targeting system of any of claims 1-35 and 46, wherein at least one effector domain comprises a sequence selected from any one of SEQ ID NOS: 1465, 1488-1495, or a domain thereof, a portion thereof, or an amino acid sequence that has at least 90%, 91%, 92%, 93%, 94%, 95%, 96%, 97%, 98%, or 99% sequence identity to any of the foregoing.

48. The DNA-targeting system of any of claims 1-47, wherein the at least one effector domain is fused to the N-terminus, the C-terminus, or both the N-terminus and the C-terminus, of the DNA-targeting domain or a component thereof.

49. The DNA-targeting system of any of claims 1-48, further comprising one or more nuclear localization signals (NLS).

50. The DNA-targeting system of claim 49, further comprising one or more linkers connecting two or more of: the DNA-targeting domain, the at least one effector domain, and the one or more nuclear localization signals.

51. The DNA-targeting system of any of claims 1-50, wherein the fusion protein comprises the sequence set forth in SEQ ID NO: 1458, or an amino acid sequence that has at least 90%, 91%, 92%, 93%, 94%, 95%, 96%, 97%, 98%, or 99% sequence identity thereto.

52. The DNA-targeting system of any one of claims 1-51, wherein reduced transcription of the gene further promotes increased production of IL-2 by the T cell.

53. The DNA-targeting system of any of claims 3-52, wherein the epigenetic-modifying DNA-targeting system reduces expression of the gene in a T cell by a log 2 fold-change of at or lesser than −1.0.

54. The DNA-targeting system of any of claims 3-53, wherein the epigenetic-modifying DNA-targeting system reduces surface expression of a T cell exhaustion marker selected from the group consisting of PD-1, CTLA-4, TIM-3, TOX, LAG-3, BTLA, 2B4, CD160, CD39, VISTA, and TIGIT.

55. A guide RNA (gRNA) that binds a target site in a gene or regulatory DNA element thereof in a T cell, wherein reduced transcription of the gene, when targeted by an epigenetic-modifying DNA-targeting system comprising the gRNA, promotes a stem cell-like memory T cell phenotype.

56. The gRNA of claim 55, wherein the stem cell-like memory T cell phenotype comprises one or more cell-surface markers selected from CCR7+, CD27+, CD45RA+, CD45RO−, CCR7+, CD62L+, CD28+, CD27+, IL-7Rα+, CXCR3+, CD95+, CD11a+, IL-2Rß+, CD58+, and CD57−.

57. The gRNA of claim 55 or claim 56, wherein the stem cell-like memory T cell phenotype comprises expression of CCR7 and/or CD27.

58. The gRNA of claim 55 or claim 56, wherein the stem cell-like memory T cell phenotype comprises expression of CCR7 and/or CD27.

59. The gRNA of any of claims 55-58, wherein the stem cell-like memory T cell phenotype is characterized by polyfunctional activity of the T cells to produce two or more cytokines following stimulation of the T cell with a stimulatory agent, optionally wherein the two or more cytokines are selected from among interferon-gamma (IFN-gamma), interleukin 2 (IL-2), and TNF-alpha.

60. The gRNA of any of claims 55-58, wherein the gene is selected from the list consisting of: BMP4, E2F7, ESRRG, LYL1, STAT5A, THAP10, ZNF362, ZSCAN1, ANHX, CPEB1, CSRNP1, EN2, EPAS1, IRX3, LHX8, NR5A2, PRDM16, RAX2, SCML4, SMAD1, SOX6, SUV39H1, TFDP1, ZNF287, ZNF438, ZNF681, ZNF853, BMP4, CARF, ESRRG, ESRRG, FOXR2, HOXA7, IRF9, KAT5, KLF5, NEUROD1, PAX6, PIN1, PURG, RARA, SNAPC5, STAT5A, TBX22, WT1, ZNF138, ZNF143, ZNF205, ZNF235, ZNF526, ZNF548, ZNF559, ZNF611, ZNF655, ZNF672, ZNF699, ZNF706, ZNF714, ZNF772, ZNF782, ZSCAN1, ZSCAN26, ADNP, AHRR, AKNA, ALX3, ALX4, AR, ARHGAP35, ARID3C, ARID5B, ASCL5, ATF6B, ATOH7, BARHL1, BARHL2, BATF, BBX, BHLHE40, BNC2, BRD4, BRD9, BSX, CCDC17, CDX1, CDX2, CDX4, CEBPB, CENPB, CLOCK, CREB3, CREB3L4, CSRNP3, CTCF, CUX1, CUX2, DACH2, DLX1, DLX4, DLX5, DLX6, DMRTB1, DNMT3B, DOTIL, DPF1, DR1, E2F2, E2F3, EBF3, EGR2, EHF, ELF5, ELMSAN1, EMX1, ETS2, ETV4, ETV4, ETV6, EZH1, FERD3L, FERD3L, FIZ1, FOS, FOSB, FOXA1, FOXA2, FOXA3, FOXC2, FOXD3, FOXE1, FOXJ3, FOXN2, FOXN4, FOXO1, FOXP3, FOXS1, GATA2, GATA3, GATAD2A, GCM2, GFI1, GLI2, GLYR1, GPBP1L1, GRHL1, GTF2B, GTF2I, HDAC2, HES2, HES7, HESX1, HEY1, HIF3A, HIVEP3, HLF, HLX, HMG20A, HMGA2, HMGN3, HMX2, HNF1A, HNF4G, HOXA1, HOXA11, HOXB1, HOXB2, HOXB3, HOXC12, HOXC9, HOXC9, HOXD9, HSF4, HSF5, IKZF1, IKZF2, IKZF3, IKZF4, IRF7, IRX3, ISL2, JRK, JRKL, KAT7, KDM1A, KDM2B, KDM5D, KLF14, KLF9, KMT2B, L3MBTL4, LEF1, LHX6, LHX9, LIN28A, LIN28A, LMX1A, MAF, MAFF, MBD3, MBD4, MBNL2, MED1, MED14, MED23, MED24, MEF2C, MEF2D, MEIS3, MESP1, MGA, MITF, MLX, MNX1, MYF5, MYOG, MYPOP, MYRFL, MYT1L, NCOR1, NEUROG1, NFAT5, NFATC2, NFATC3, NFE2L1, NFE2L3, NFIA, NFYB, NKX1-2, NKX2-3, NKX2-4, NKX2-5, NOTCH3, NOTO, NR1H2, NR1H4, NR112, NR2C2, NR2F1, OSR2, OTX1, OVOL1, PA2G4, PATZ1, PAX9, PAX9, PBX4, PGR, PITX1, PITX3, POU2F2, POU3F1, POU3F2, POU3F3, POU5F1, PRDM1, PRDM7, PRR12, PRRX1, RBCK1, RHOXF1, RUNX2, SALL3, SIM1, SIX1, SIX6, SKI, SKIL, SKOR1, SMAD2, SMAD5, SMYD3, SNAPC2, SOX1, SOX14, SOX30, SOX5, SOX6, SP2, SP3, SP5, SP8, SP9, SPIB, STAT5B, T, TBPL1, TBX5, TBX6, TCF12, TCF23, TCF3, TFAP2A, TFAP2E, TFDP2, TFDP3, TGIF2, TGIF2LX, THAP6, THRA, TIGD1, TIGD3, TIGD5, TLX3, TOX, TOX2, TRIM27, TRIM27, TRIM40, TRIM52, TSHZ2, VAX1, VEGFA, VSX1, WNT1, WNT3A, YBX1, YY1, YY2, ZBED5, ZBTB2, ZBTB21, ZBTB38, ZBTB4, ZBTB40, ZBTB42, ZBTB49, ZBTB7B, ZBTB7C, ZBTB8B, ZBTB9, ZC3H8, ZEB2, ZFHX2, ZFHX3, ZFP28, ZFP41, ZFP69B, ZFP90, ZGLP1, ZHX3, ZIC5, ZKSCAN1, ZKSCAN2, ZKSCAN7, ZNF107, ZNF121, ZNF132, ZNF135, ZNF140, ZNF141, ZNF222, ZNF225, ZNF229, ZNF230, ZNF248, ZNF25, ZNF26, ZNF267, ZNF280C, ZNF281, ZNF283, ZNF286B, ZNF304, ZNF317, ZNF318, ZNF320, ZNF33B, ZNF346, ZNF358, ZNF367, ZNF382, ZNF383, ZNF385B, ZNF391, ZNF415, ZNF423, ZNF43, ZNF432, ZNF433, ZNF436, ZNF441, ZNF443, ZNF461, ZNF462, ZNF468, ZNF473, ZNF483, ZNF486, ZNF491, ZNF507, ZNF514, ZNF519, ZNF540, ZNF543, ZNF546, ZNF549, ZNF555, ZNF562, ZNF567, ZNF569, ZNF574, ZNF577, ZNF596, ZNF610, ZNF616, ZNF621, ZNF626, ZNF627, ZNF629, ZNF630, ZNF630, ZNF641, ZNF645, ZNF658, ZNF660, ZNF662, ZNF677, ZNF682, ZNF697, ZNF703, ZNF705A, ZNF705B, ZNF705G, ZNF716, ZNF729, ZNF750, ZNF75A, ZNF765, ZNF771, ZNF773, ZNF774, ZNF778, ZNF784, ZNF789, ZNF804B, ZNF816, ZNF823, ZNF83, ZNF831, ZNF846, ZNF852, ZNF879, ZNF91, ZNF93, ZNF99, ZNF99, ZSCAN16, ZSCAN2, ZSCAN21, ZSCAN5A, and ZSCAN5B.

61. A guide RNA (gRNA) that binds a target site in a gene or regulatory DNA element thereof in a T cell, wherein reduced transcription of the gene, when targeted by an epigenetic-modifying DNA-targeting system comprising the gRNA, promotes a stem cell-like memory T cell phenotype, and wherein the gene is selected from the list consisting of: BMP4, E2F7, ESRRG, LYL1, STAT5A, THAP10, ZNF362, ZSCAN1, ANHX, CPEB1, CSRNP1, EN2, EPAS1, IRX3, LHX8, NR5A2, PRDM16, RAX2, SCML4, SMAD1, SOX6, SUV39H1, TFDP1, ZNF287, ZNF438, ZNF681, ZNF853, BMP4, CARF, ESRRG, ESRRG, FOXR2, HOXA7, IRF9, KAT5, KLF5, NEUROD1, PAX6, PIN1, PURG, RARA, SNAPC5, STAT5A, TBX22, WT1, ZNF138, ZNF143, ZNF205, ZNF235, ZNF526, ZNF548, ZNF559, ZNF611, ZNF655, ZNF672, ZNF699, ZNF706, ZNF714, ZNF772, ZNF782, ZSCAN1, ZSCAN26, ADNP, AHRR, AKNA, ALX3, ALX4, AR, ARHGAP35, ARID3C, ARID5B, ASCL5, ATF6B, ATOH7, BARHL1, BARHL2, BATF, BBX, BHLHE40, BNC2, BRD4, BRD9, BSX, CCDC17, CDX1, CDX2, CDX4, CEBPB, CENPB, CLOCK, CREB3, CREB3L4, CSRNP3, CTCF, CUX1, CUX2, DACH2, DLX1, DLX4, DLX5, DLX6, DMRTB1, DNMT3B, DOTIL, DPF1, DR1, E2F2, E2F3, EBF3, EGR2, EHF, ELF5, ELMSAN1, EMX1, ETS2, ETV4, ETV4, ETV6, EZH1, FERD3L, FERD3L, FIZ1, FOS, FOSB, FOXA1, FOXA2, FOXA3, FOXC2, FOXD3, FOXE1, FOXJ3, FOXN2, FOXN4, FOXO1, FOXP3, FOXS1, GATA2, GATA3, GATAD2A, GCM2, GFI1, GLI2, GLYR1, GPBP1L1, GRHL1, GTF2B, GTF2I, HDAC2, HES2, HES7, HESX1, HEY1, HIF3A, HIVEP3, HLF, HLX, HMG20A, HMGA2, HMGN3, HMX2, HNF1A, HNF4G, HOXA1, HOXA11, HOXB1, HOXB2, HOXB3, HOXC12, HOXC9, HOXC9, HOXD9, HSF4, HSF5, IKZF1, IKZF2, IKZF3, IKZF4, IRF7, IRX3, ISL2, JRK, JRKL, KAT7, KDM1A, KDM2B, KDM5D, KLF14, KLF9, KMT2B, L3MBTL4, LEF1, LHX6, LHX9, LIN28A, LIN28A, LMX1A, MAF, MAFF, MBD3, MBD4, MBNL2, MED1, MED14, MED23, MED24, MEF2C, MEF2D, MEIS3, MESP1, MGA, MITF, MLX, MNX1, MYF5, MYOG, MYPOP, MYRFL, MYT1L, NCOR1, NEUROG1, NFAT5, NFATC2, NFATC3, NFE2L1, NFE2L3, NFIA, NFYB, NKX1-2, NKX2-3, NKX2-4, NKX2-5, NOTCH3, NOTO, NR1H2, NR1H4, NR112, NR2C2, NR2F1, OSR2, OTX1, OVOL1, PA2G4, PATZ1, PAX9, PAX9, PBX4, PGR, PITX1, PITX3, POU2F2, POU3F1, POU3F2, POU3F3, POU5F1, PRDM1, PRDM7, PRR12, PRRX1, RBCK1, RHOXF1, RUNX2, SALL3, SIM1, SIX1, SIX6, SKI, SKIL, SKOR1, SMAD2, SMAD5, SMYD3, SNAPC2, SOX1, SOX14, SOX30, SOX5, SOX6, SP2, SP3, SP5, SP8, SP9, SPIB, STAT5B, T, TBPL1, TBX5, TBX6, TCF12, TCF23, TCF3, TFAP2A, TFAP2E, TFDP2, TFDP3, TGIF2, TGIF2LX, THAP6, THRA, TIGD1, TIGD3, TIGD5, TLX3, TOX, TOX2, TRIM27, TRIM27, TRIM40, TRIM52, TSHZ2, VAX1, VEGFA, VSX1, WNT1, WNT3A, YBX1, YY1, YY2, ZBED5, ZBTB2, ZBTB21, ZBTB38, ZBTB4, ZBTB40, ZBTB42, ZBTB49, ZBTB7B, ZBTB7C, ZBTB8B, ZBTB9, ZC3H8, ZEB2, ZFHX2, ZFHX3, ZFP28, ZFP41, ZFP69B, ZFP90, ZGLP1, ZHX3, ZIC5, ZKSCAN1, ZKSCAN2, ZKSCAN7, ZNF107, ZNF121, ZNF132, ZNF135, ZNF140, ZNF141, ZNF222, ZNF225, ZNF229, ZNF230, ZNF248, ZNF25, ZNF26, ZNF267, ZNF280C, ZNF281, ZNF283, ZNF286B, ZNF304, ZNF317, ZNF318, ZNF320, ZNF33B, ZNF346, ZNF358, ZNF367, ZNF382, ZNF383, ZNF385B, ZNF391, ZNF415, ZNF423, ZNF43, ZNF432, ZNF433, ZNF436, ZNF441, ZNF443, ZNF461, ZNF462, ZNF468, ZNF473, ZNF483, ZNF486, ZNF491, ZNF507, ZNF514, ZNF519, ZNF540, ZNF543, ZNF546, ZNF549, ZNF555, ZNF562, ZNF567, ZNF569, ZNF574, ZNF577, ZNF596, ZNF610, ZNF616, ZNF621, ZNF626, ZNF627, ZNF629, ZNF630, ZNF630, ZNF641, ZNF645, ZNF658, ZNF660, ZNF662, ZNF677, ZNF682, ZNF697, ZNF703, ZNF705A, ZNF705B, ZNF705G, ZNF716, ZNF729, ZNF750, ZNF75A, ZNF765, ZNF771, ZNF773, ZNF774, ZNF778, ZNF784, ZNF789, ZNF804B, ZNF816, ZNF823, ZNF83, ZNF831, ZNF846, ZNF852, ZNF879, ZNF91, ZNF93, ZNF99, ZNF99, ZSCAN16, ZSCAN2, ZSCAN21, ZSCAN5A, and ZSCAN5B.

62. The gRNA of any of claims 55-61, wherein the target site is in a regulatory DNA element and the regulatory DNA element is an enhancer or a promoter.

63. The gRNA of any of claims 55-62, wherein the target site comprises the sequence set forth in any one of SEQ ID NOS: 1-484, a contiguous portion thereof of at least 14 nucleotides (nt), or a complementary sequence of any of the foregoing.

64. The gRNA of any of claims 53-60, wherein the gRNA comprises a gRNA spacer sequence comprising the sequence set forth in SEQ ID NO: 485-968, or a contiguous portion thereof of at least 14 nt.

65. The gRNA of claim 64, wherein the gRNA further comprises the sequence set forth in SEQ ID NO: 1454.

66. The gRNA of any of claims 55-65, wherein the gRNA comprises a gRNA that comprises the sequence set forth in any one of SEQ ID NOS: 969-1452, optionally wherein the at least one gRNA is the gRNA set forth in any one of SEQ ID NOS: 969-1452.

67. The gRNA of claim 60 or claim 61, wherein the gene is selected from the list consisting of: BMP4, E2F7, ESRRG, LYL1, STAT5A, THAP10, ZNF362, ZSCAN1, ANHX, CPEB1, CSRNP1, EN2, EPAS1, IRX3, LHX8, NR5A2, PRDM16, RAX2, SCML4, SMAD1, SOX6, SUV39H1, TFDP1, ZNF287, ZNF438, ZNF681, and ZNF853.

68. The gRNA of claim 60, claim 61 or claim 67, wherein the target site comprises the sequence set forth in any one of SEQ ID NOS: 1-27, a contiguous portion thereof of at least 14 nucleotides (nt), or a complementary sequence of any of the foregoing.

69. The gRNA of claims 60, 61, 67 and 68, wherein the gRNA comprises a gRNA spacer sequence comprising the sequence set forth in SEQ ID NO: 485-511, or a contiguous portion thereof of at least 14 nt.

70. The gRNA of claim 69, wherein the at least one gRNA further comprises the sequence set forth in SEQ ID NO: 1454.

71. The gRNA of claim 60, claim 61 or any of claims 67-70, wherein the gRNA comprises a gRNA that comprises the sequence set forth in any one of SEQ ID NOS: 969-995, optionally wherein the at least one gRNA is the gRNA set forth in any one of SEQ ID NOS: 969-995.

72. The gRNA of claim 60 or claim 61, wherein the gene is selected from the list consisting of: BMP4, E2F7, ESRRG, LYL1, STAT5A, THAP10, ZNF362, and ZSCAN1.

73. The gRNA of claim 60, claim 61 or claim 72, wherein the target site comprises the sequence set forth in any one of SEQ ID NOS: 1-8, a contiguous portion thereof of at least 14 nucleotides (nt), or a complementary sequence of any of the foregoing.

74. The gRNA of claim 60, 61, 72 or 73, wherein the gRNA comprises a gRNA spacer sequence comprising the sequence set forth in SEQ ID NO: 485-492, or a contiguous portion thereof of at least 14 nt.

75. The gRNA of claim 74, wherein the gRNA further comprises the sequence set forth in SEQ ID NO: 1454.

76. The gRNA of any of claims 60. 61 and 72-75, wherein the at least one gRNA comprises a gRNA that comprises the sequence set forth in any one of SEQ ID NOS: 969-976, optionally wherein the at least one gRNA is the gRNA set forth in any one of SEQ ID NOS: 969-976.

77. The gRNA of any of claims 55-76, wherein the gRNA spacer sequence is between 14 nt and 24 nt, or between 16 nt and 22 nt in length.

78. The gRNA of any of claims 55-77, wherein the gRNA spacer sequence is 18 nt, 19 nt, 20 nt, 21 nt or 22 nt in length.

79. The gRNA of any of claims 55-78, wherein the gRNA comprises modified nucleotides for increased stability.

80. The gRNA of any of claims 55-79, wherein the gRNA is capable of complexing with a Cas protein or variant thereof.

81. The gRNA of any of claims 55-80, wherein the gRNA is capable of hybridizing to the target site or is complementary to the target site.

82. A CRISPR Cas-guide RNA (gRNA) combination comprising:
(a) a Clustered Regularly Interspaced Short Palindromic Repeats associated (Cas) protein or variant thereof; and
(b) at least one gRNA of any of claims 53-78 that targets the Cas protein or variant thereof to a target site in a gene or regulatory DNA element thereof of a T cell.

83. The CRISPR Cas-gRNA combination of claim 82, wherein the Cas protein or a variant thereof is a Cas9 protein or a variant thereof.

84. The CRISPR Cas-gRNA combination of claim 82 or claim 83, wherein the Cas protein or a variant thereof is a variant Cas protein, wherein the variant Cas protein lacks nuclease activity or is a deactivated Cas (dCas) protein.

85. The CRISPR Cas-gRNA combination of claim 83 or claim 84, wherein the variant Cas protein is a variant Cas9 protein that lacks nuclease activity or that is a deactivated Cas9 (dCas9) protein.

86. The CRISPR Cas-gRNA combination of claim 83, wherein the Cas9 protein or a variant thereof is a Staphylococcus aureus Cas9 (SaCas9) protein or a variant thereof.

87. The CRISPR Cas-gRNA combination of claim 83 or claim 84, wherein the variant Cas9 is a Staphylococcus aureus dCas9 protein (dSaCas9) that comprises at least one amino acid mutation selected from D10A and N580A, with reference to numbering of positions of SEQ ID NO: 1461.

88. The CRISPR Cas-gRNA combination of claim 83, 84 or 87, wherein the variant Cas9 protein comprises the sequence set forth in SEQ ID NO: 1462, or an amino acid sequence that has at least 90%, 91%, 92%, 93%, 94%, 95%, 96%, 97%, 98%, or 99% sequence identity thereto.

89. The CRISPR Cas-gRNA combination of claim 83, wherein the Cas9 protein or variant thereof is a Streptococcus pyogenes Cas9 (SpCas9) protein or a variant thereof.

90. The CRISPR Cas-gRNA combination of any of claim 83 or claim 84, wherein the variant Cas9 is a Streptococcus pyogenes dCas9 (dSpCas9) protein that comprises at least one amino acid mutation selected from D10A and H840A, with reference to numbering of positions of SEQ ID NO: 1463.

91. The CRISPR Cas-gRNA combination of claim 83, claim 84 or claim 90, wherein the variant Cas9 protein comprises the sequence set forth in SEQ ID NO: 1464, or an amino acid sequence that has at least 90%, 91%, 92%, 93%, 94%, 95%, 96%, 97%, 98%, or 99% sequence identity thereto.

92. A polynucleotide encoding the DNA-targeting system of any of claims 1-54 or the fusion protein of the DNA-targeting system of any of claims 1-54, the gRNA of any of claims 55-81, the CRISPR Cas-gRNA combination of any of claims 82-91, or a portion or a component of any of the foregoing.

93. A plurality of polynucleotides encoding the DNA-targeting system of any of claims 1-56 or the fusion protein of the DNA-targeting system of any of claims 1-56, the gRNA of any of claims 57-75, the CRISPR Cas-gRNA combination of any of claims 82-91, or a portion or a component of any of the foregoing

94. A vector comprising the polynucleotide of claim 92.

95. A vector comprising the plurality of polynucleotides of claim 93.

96. The vector of claim 94 or claim 95, wherein the vector is a viral vector.

97. The vector of claim 96, wherein the vector is an adeno-associated virus (AAV) vector.

98. The vector of claim 97, wherein the vector is selected from among AAV1, AAV2, AAV3, AAV4, AAV5, AAV6, AAV7, AAV8, or AAV9.

99. The vector of claim 96, wherein the vector is a lentiviral vector.

100. The vector of claim 94 or claim 95, wherein the vector is a non-viral vector.

101. The vector of claim 100, wherein the non-viral vector is selected from: a lipid nanoparticle, a liposome, an exosome, or a cell penetrating peptide.

102. The vector of any of claims 94-101, wherein the vector exhibits immune cell or T-cell tropism.

103. The vector of any of claims 94-102, wherein the vector comprises one vector, or two or more vectors.

104. A modified T cell comprising the DNA-targeting system of any one of claims 1-56, the gRNA of any of claims 57-91, the CRISPR Cas-gRNA combination of any of claims 82-91, the polynucleotide of claim 92, the plurality of polynucleotides of claim 93, the vector of any of claims 94-103, or a portion or a component of any of the foregoing.

105. A modified T cell comprising an epigenetic or phenotypic modification resulting from being contacted by the DNA-targeting system of any of claims 1-54, the gRNA of any of claims 55-81, the CRISPR Cas-gRNA combination of any of claims 82-91, the polynucleotide of claim 92, the plurality of polynucleotides of claim 93, the vector of any of claims 94-103, or a portion or a component of any of the foregoing.

106. The modified T cell of claim 104 or claim 105, wherein the modified T cell exhibits reduced transcription of one or more genes whose transcriptional repression promotes a stem cell-like memory T-cell phenotype, in comparison to a comparable unmodified T cell.

107. The modified T cell of claim 106, wherein the one or more genes are selected from the list consisting of: BMP4, E2F7, ESRRG, LYL1, STAT5A, THAP10, ZNF362, ZSCAN1, ANHX, CPEB1, CSRNP1, EN2, EPAS1, IRX3, LHX8, NR5A2, PRDM16, RAX2, SCML4, SMAD1, SOX6, SUV39H1, TFDP1, ZNF287, ZNF438, ZNF681, ZNF853, BMP4, CARF, ESRRG, ESRRG, FOXR2, HOXA7, IRF9, KAT5, KLF5, NEUROD1, PAX6, PIN1, PURG, RARA, SNAPC5, STAT5A, TBX22, WT1, ZNF138, ZNF143, ZNF205, ZNF235, ZNF526, ZNF548, ZNF559, ZNF611, ZNF655, ZNF672, ZNF699, ZNF706, ZNF714, ZNF772, ZNF782, ZSCAN1, ZSCAN26, ADNP, AHRR, AKNA, ALX3, ALX4, AR, ARHGAP35, ARID3C, ARID5B, ASCL5, ATF6B, ATOH7, BARHL1, BARHL2, BATF, BBX, BHLHE40, BNC2, BRD4, BRD9, BSX, CCDC17, CDX1, CDX2, CDX4, CEBPB, CENPB, CLOCK, CREB3, CREB3L4, CSRNP3, CTCF, CUX1, CUX2, DACH2, DLX1, DLX4, DLX5, DLX6, DMRTB1, DNMT3B, DOTIL, DPF1, DR1, E2F2, E2F3, EBF3, EGR2, EHF, ELF5, ELMSAN1, EMX1, ETS2, ETV4, ETV4, ETV6, EZH1, FERD3L, FERD3L, FIZ1, FOS, FOSB, FOXA1, FOXA2, FOXA3, FOXC2, FOXD3, FOXE1, FOXJ3, FOXN2, FOXN4, FOXO1, FOXP3, FOXS1, GATA2, GATA3, GATAD2A, GCM2, GFI1, GLI2, GLYR1, GPBP1L1, GRHL1, GTF2B, GTF2I, HDAC2, HES2, HES7, HESX1, HEY1, HIF3A, HIVEP3, HLF, HLX, HMG20A, HMGA2, HMGN3, HMX2, HNF1A, HNF4G, HOXA1, HOXA11, HOXB1, HOXB2, HOXB3, HOXC12, HOXC9, HOXC9, HOXD9, HSF4, HSF5, IKZF1, IKZF2, IKZF3, IKZF4, IRF7, IRX3, ISL2, JRK, JRKL, KAT7, KDM1A, KDM2B, KDM5D, KLF14, KLF9, KMT2B, L3MBTL4, LEF1, LHX6, LHX9, LIN28A, LIN28A, LMX1A, MAF, MAFF, MBD3, MBD4, MBNL2, MED1, MED14, MED23, MED24, MEF2C, MEF2D, MEIS3, MESP1, MGA, MITF, MLX, MNX1, MYF5, MYOG, MYPOP, MYRFL, MYT1L, NCOR1, NEUROG1, NFAT5, NFATC2, NFATC3, NFE2L1, NFE2L3, NFIA, NFYB, NKX1-2, NKX2-3, NKX2-4, NKX2-5, NOTCH3, NOTO, NR1H2, NR1H4, NR112, NR2C2, NR2F1, OSR2, OTX1, OVOL1, PA2G4, PATZ1, PAX9, PAX9, PBX4, PGR, PITX1, PITX3, POU2F2, POU3F1, POU3F2, POU3F3, POU5F1, PRDM1, PRDM7, PRR12, PRRX1, RBCK1, RHOXF1, RUNX2, SALL3, SIM1, SIX1, SIX6, SKI, SKIL, SKOR1, SMAD2, SMAD5, SMYD3, SNAPC2, SOX1, SOX14, SOX30, SOX5, SOX6, SP2, SP3, SP5, SP8, SP9, SPIB, STAT5B, T, TBPL1, TBX5, TBX6, TCF12, TCF23, TCF3, TFAP2A, TFAP2E, TFDP2, TFDP3, TGIF2, TGIF2LX, THAP6, THRA, TIGD1, TIGD3, TIGD5, TLX3, TOX, TOX2, TRIM27, TRIM27, TRIM40, TRIM52, TSHZ2, VAX1, VEGFA, VSX1, WNT1, WNT3A, YBX1, YY1, YY2, ZBED5, ZBTB2, ZBTB21, ZBTB38, ZBTB4, ZBTB40, ZBTB42, ZBTB49, ZBTB7B, ZBTB7C, ZBTB8B, ZBTB9, ZC3H8, ZEB2, ZFHX2, ZFHX3, ZFP28, ZFP41, ZFP69B, ZFP90, ZGLP1, ZHX3, ZIC5, ZKSCAN1, ZKSCAN2, ZKSCAN7, ZNF107, ZNF121, ZNF132, ZNF135, ZNF140, ZNF141, ZNF222, ZNF225, ZNF229, ZNF230, ZNF248, ZNF25, ZNF26, ZNF267, ZNF280C, ZNF281, ZNF283, ZNF286B, ZNF304, ZNF317, ZNF318, ZNF320, ZNF33B, ZNF346, ZNF358, ZNF367, ZNF382, ZNF383, ZNF385B, ZNF391, ZNF415, ZNF423, ZNF43, ZNF432, ZNF433, ZNF436, ZNF441, ZNF443, ZNF461, ZNF462, ZNF468, ZNF473, ZNF483, ZNF486, ZNF491, ZNF507, ZNF514, ZNF519, ZNF540, ZNF543, ZNF546, ZNF549, ZNF555, ZNF562, ZNF567, ZNF569, ZNF574, ZNF577, ZNF596, ZNF610, ZNF616, ZNF621, ZNF626, ZNF627, ZNF629, ZNF630, ZNF630, ZNF641, ZNF645, ZNF658, ZNF660, ZNF662, ZNF677, ZNF682, ZNF697, ZNF703, ZNF705A, ZNF705B, ZNF705G, ZNF716, ZNF729, ZNF750, ZNF75A, ZNF765, ZNF771, ZNF773, ZNF774, ZNF778, ZNF784, ZNF789, ZNF804B, ZNF816, ZNF823, ZNF83, ZNF831, ZNF846, ZNF852, ZNF879, ZNF91, ZNF93, ZNF99, ZNF99, ZSCAN16, ZSCAN2, ZSCAN21, ZSCAN5A, and ZSCAN5B.

108. The modified T cell of claim 106, wherein the one or more genes are selected from the list consisting of: BMP4, E2F7, ESRRG, LYL1, STAT5A, THAP10, ZNF362, ZSCAN1, ANHX, CPEB1, CSRNP1, EN2, EPAS1, IRX3, LHX8, NR5A2, PRDM16, RAX2, SCML4, SMAD1, SOX6, SUV39H1, TFDP1, ZNF287, ZNF438, ZNF681, and ZNF853.

109. The modified T cell of claim 106, wherein the one or more genes are selected from the list consisting of: BMP4, E2F7, ESRRG, LYL1, STAT5A, THAP10, ZNF362, and ZSCAN1.

110. The modified T cell of any of claims 106-109, wherein the transciption is reduced by at least about 1.2-fold, 1.25-fold, 1.3-fold, 1.4-fold, 1.5-fold, 1.6-fold, 1.7-fold, 1.75-fold, 1.8-fold, 1.9-fold, 2-fold, 2.5-fold, 3-fold, 4-fold, or 5-fold.

111. The modified T cell of any of claims 104-110, wherein the modified T cell exhibits a stem cell-like memory T-cell phenotype.

112. The modified T cell of claim 111, wherein the stem cell-like memory T cell phenotype comprises expression of CCR7 and/or CD27.

113. The modified T cell of claim 111, wherein the stem cell-like memory T cell phenotype comprises expression of CCR7 and CD27.

114. The modified T cell of any of claims 111-113, wherein the stem cell-like memory T cell phenotype comprises one or more cell-surface markers selected from CCR7+, CD27+, CD45RA+, CD45RO−, CCR7+, CD62L+, CD28+, CD27+, IL-7Rα+, CXCR3+, CD95+, CD11a+, IL-2Rβ+, CD58+, and CD57−.

115. The modified T cell of any of claims 104-114, wherein the modified T cell is capable of a stronger and/or more persistent immune response, in comparison to a comparable unmodified T cell.

116. The modified T cell of any of claims 104-115, wherein the modified T cell is characterized by polyfunctional activity of the T cells to produce two or more cytokines following stimulation of T cells with a stimulatory agent, optionally wherein the two or more cytokines are selected from among interferon-gamma (IFN-gamma), interleukin 2 (IL-2) and TNF-alpha.

117. The modified T cell of any of claims 104-116, wherein the modified T cell is derived from a cell from a subject.

118. The modified T cell of any of claims 104-117, wherein the modified T cell is derived from a primary T cell.

119. The modified T cell of any of claims 104-117, wherein the modified T cell is derived from a T cell progenitor, a pluripotent stem cell, or an induced pluripotent stem cell.

120. The modified T cell of any of claims 104-119, wherein the modified T cell further comprises an engineered T cell receptor (eTCR) or chimeric antigen receptor (CAR).

121. A method of reducing the transcription of one or more genes in a T cell, the method comprising introducing into a T cell the DNA-targeting system of any of claims 1-54, the gRNA of any of claims 55-81, the CRISPR Cas-gRNA combination of any of claims 82-91, the polynucleotide of claim 92, the plurality of polynucleotides of claim 93, the vector of any of claims 94-103, or a portion or a component of any of the foregoing.

122. The method of claim 121, wherein the one or more genes is a gene epigenetically modified by the DNA-targeting system.

123. The method of claim 121 or claim 122, wherein the transcription of the one or more genes is reduced in comparison to a comparable T cell not subjected to the method.

124. The method of any of claims 121-123, wherein the transcription of the one or more genes is reduced by at least about 1.2-fold, 1.25-fold, 1.3-fold, 1.4-fold, 1.5-fold, 1.6-fold, 1.7-fold, 1.75-fold, 1.8-fold, 1.9-fold, 2-fold, 2.5-fold, 3-fold, 4-fold, or 5-fold.

125. The method of any of claims 121-124, wherein the reduced transcription of the one or more genes promotes a stem cell-like memory T cell phenotype in the T cell.

126. A method of promoting a stem cell-like memory T cell phenotype in a T cell, the method comprising introducing into the T cell the DNA-targeting system of any one of claims 1-54, the gRNA of any of claims 55-81, the CRISPR Cas-gRNA combination of any of claims 82-91, the polynucleotide of claim 92, the plurality of polynucleotides of claim 93, the vector of any of claims 94-103, or a portion or a component of any of the foregoing.

127. The method of claim 125 or claim 126, wherein the stem cell-like memory T cell phenotype comprises one or more cell-surface markers selected from CCR7+, CD27+, CD45RA+, CD45RO−, CCR7+, CD62L+, CD28+, CD27+, IL-7Rα+, CXCR3+, CD95+, CD11a+, IL-2Rβ+, CD58+, and CD57−.

128. The method of any of claims 125-127, wherein the stem cell-like memory T cell phenotype comprises expression of CCR7 and/or CD27.

129. The method of any of claims 125-128, wherein the stem cell-like memory T cell phenotype is characterized by polyfunctional activity of the T cell to produce two or more cytokines following stimulation of the T cell with a stimulatory agent, optionally wherein the two or more cytokines are selected from among interferon-gamma (IFN-gamma), interleukin 2 (IL-2), and TNF-alpha.

130. The method of any of claims 121-129, wherein the T cell is a T cell in a subject and the method is carried out in vivo.

131. The method of any of claims 121-129, wherein the T cell is a T cell from a subject, or derived from a cell from the subject, and the method is carried out ex vivo.

132. The method of claim 131, wherein the T cell is a primary T cell.

133. The method of claim 131, wherein the T cell is derived from a T cell progenitor, a pluripotent stem cell, or an induced pluripotent stem cell.

134. A modified T cell produced by the method of any of claims 121-133.

135. A method of cell therapy for treating a disease in a subject in need thereof, comprising administering to the subject a cellular composition that comprises the modified T cell of any of claims 104-120 and 134.

136. The method of claim 135, wherein the modified T cell is obtained from or derived from a cell from said subject in need thereof.

137. The method of claim 135, wherein the subject is a first subject, and the modified T cell is obtained from or derived from a cell from a second subject.

138. The method of any of claims 135-137, wherein the subject in need thereof is a human.

139. The method of any of claims 135-138, wherein the administered modified T cell exhibits a stronger and/or more persistent immune response in the subject, in comparison to a comparable unmodified T cell.

140. The method of any of claims 135-139, wherein the subject has or is suspected of having a disease, condition, or disorder, optionally wherein the disease, condition, or disorder is cancer, viral infection, autoimmune disease, or graft-versus-host disease, or the subject has undergone or is expected to undergo organ transplantation.

141. The method of any of claims 135-140, wherein the subject has or is suspected of having cancer.

142. A pharmaceutical composition comprising the modified T cell of any of claims 104-120 and 134.

143. A pharmaceutical composition comprising the DNA-targeting system of any of claims 1-54, the gRNA of any of claims 55-81, the CRISPR Cas-gRNA combination of any of claims 82-91, the polynucleotide of claim 92, the plurality of polynucleotides of claim 93, the vector of any of claims 94-103, or a portion or a component of any of the foregoing.

144. The pharmaceutical composition of claim 142 or claim 143, for use in treating a disease, condition, or disorder in a subject.

145. The pharmaceutical composition of claim 142 or claim 143, for use in the manufacture of a medicament for treating a disease, condition, or disorder in a subject.

146. The pharmaceutical composition of claim 144 or 145, wherein the subject has or is suspected of having a disease, condition, or disorder, optionally wherein the disease, condition, or disorder is cancer, viral infection, autoimmune disease, or graft-versus-host disease, or the subject has undergone or is expected to undergo organ transplantation.

147. The pharmaceutical composition of any of claims 144-146, wherein the subject has or is suspected of having cancer.

148. The pharmaceutical composition of any of claims 144-147, wherein the pharmaceutical composition is to be administered to the subject in vivo.

149. The pharmaceutical composition of any of claims 144-147, wherein the subject is a first subject, and the pharmaceutical composition is to be administered ex vivo to T cells from the first subject, or to T cells from a second subject.

150. The pharmaceutical composition of claim 149, wherein following administration to T cells from the first subject or second subject, the T cells are administered to the first subject.

151. The pharmaceutical composition of any of claims 143-148, wherein following administration of the pharmaceutical composition, the expression of one or more genes is reduced in T cells of the subject.

152. The pharmaceutical composition of claim 149 or claim 150, wherein following administration of the pharmaceutical composition to the T cells from the first or second subject, the expression of one or more genes is reduced in the T cells.

153. The pharmaceutical composition of claim 151 or claim 152, wherein the one or more genes are selected from the list consisting of: BMP4, E2F7, ESRRG, LYL1, STAT5A, THAP10, ZNF362, ZSCAN1, ANHX, CPEB1, CSRNP1, EN2, EPAS1, IRX3, LHX8, NR5A2, PRDM16, RAX2, SCML4, SMAD1, SOX6, SUV39H1, TFDP1, ZNF287, ZNF438, ZNF681, ZNF853, BMP4, CARF, ESRRG, ESRRG, FOXR2, HOXA7, IRF9, KAT5, KLF5, NEUROD1, PAX6, PIN1, PURG, RARA, SNAPC5, STAT5A, TBX22, WT1, ZNF138, ZNF143, ZNF205, ZNF235, ZNF526, ZNF548, ZNF559, ZNF611, ZNF655, ZNF672, ZNF699, ZNF706, ZNF714, ZNF772, ZNF782, ZSCAN1, ZSCAN26, ADNP, AHRR, AKNA, ALX3, ALX4, AR, ARHGAP35, ARID3C, ARID5B, ASCL5, ATF6B, ATOH7, BARHL1, BARHL2, BATF, BBX, BHLHE40, BNC2, BRD4, BRD9, BSX, CCDC17, CDX1, CDX2, CDX4, CEBPB, CENPB, CLOCK, CREB3, CREB3L4, CSRNP3, CTCF, CUX1, CUX2, DACH2, DLX1, DLX4, DLX5, DLX6, DMRTB1, DNMT3B, DOTIL, DPF1, DR1, E2F2, E2F3, EBF3, EGR2, EHF, ELF5, ELMSAN1, EMX1, ETS2, ETV4, ETV4, ETV6, EZH1, FERD3L, FERD3L, FIZ1, FOS, FOSB, FOXA1, FOXA2, FOXA3, FOXC2, FOXD3, FOXE1, FOXJ3, FOXN2, FOXN4, FOXO1, FOXP3, FOXS1, GATA2, GATA3, GATAD2A, GCM2, GFI1, GLI2, GLYR1, GPBP1L1, GRHL1, GTF2B, GTF2I, HDAC2, HES2, HES7, HESX1, HEY1, HIF3A, HIVEP3, HLF, HLX, HMG20A, HMGA2, HMGN3, HMX2, HNF1A, HNF4G, HOXA1, HOXA11, HOXB1, HOXB2, HOXB3, HOXC12, HOXC9, HOXC9, HOXD9, HSF4, HSF5, IKZF1, IKZF2, IKZF3, IKZF4, IRF7, IRX3, ISL2, JRK, JRKL, KAT7, KDM1A, KDM2B, KDM5D, KLF14, KLF9, KMT2B, L3MBTL4, LEF1, LHX6, LHX9, LIN28A, LIN28A, LMX1A, MAF, MAFF, MBD3, MBD4, MBNL2, MED1, MED14, MED23, MED24, MEF2C, MEF2D, MEIS3, MESP1, MGA, MITF, MLX, MNX1, MYF5, MYOG, MYPOP, MYRFL, MYT1L, NCOR1, NEUROG1, NFAT5, NFATC2, NFATC3, NFE2L1, NFE2L3, NFIA, NFYB, NKX1-2, NKX2-3, NKX2-4, NKX2-5, NOTCH3, NOTO, NR1H2, NR1H4, NR112, NR2C2, NR2F1, OSR2, OTX1, OVOL1, PA2G4, PATZ1, PAX9, PAX9, PBX4, PGR, PITX1, PITX3, POU2F2, POU3F1, POU3F2, POU3F3, POU5F1, PRDM1, PRDM7, PRR12, PRRX1, RBCK1, RHOXF1, RUNX2, SALL3, SIM1, SIX1, SIX6, SKI, SKIL, SKOR1, SMAD2, SMAD5, SMYD3, SNAPC2, SOX1, SOX14, SOX30, SOX5, SOX6, SP2, SP3, SP5, SP8, SP9, SPIB, STAT5B, T, TBPL1, TBX5, TBX6, TCF12, TCF23, TCF3, TFAP2A, TFAP2E, TFDP2, TFDP3, TGIF2, TGIF2LX, THAP6, THRA, TIGD1, TIGD3, TIGD5, TLX3, TOX, TOX2, TRIM27, TRIM27, TRIM40, TRIM52, TSHZ2, VAX1, VEGFA, VSX1, WNT1, WNT3A, YBX1, YY1, YY2, ZBED5, ZBTB2, ZBTB21, ZBTB38, ZBTB4, ZBTB40, ZBTB42, ZBTB49, ZBTB7B, ZBTB7C, ZBTB8B, ZBTB9, ZC3H8, ZEB2, ZFHX2, ZFHX3, ZFP28, ZFP41, ZFP69B, ZFP90, ZGLP1, ZHX3, ZIC5, ZKSCAN1, ZKSCAN2, ZKSCAN7, ZNF107, ZNF121, ZNF132, ZNF135, ZNF140, ZNF141, ZNF222, ZNF225, ZNF229, ZNF230, ZNF248, ZNF25, ZNF26, ZNF267, ZNF280C, ZNF281, ZNF283, ZNF286B, ZNF304, ZNF317, ZNF318, ZNF320, ZNF33B, ZNF346, ZNF358, ZNF367, ZNF382, ZNF383, ZNF385B, ZNF391, ZNF415, ZNF423, ZNF43, ZNF432, ZNF433, ZNF436, ZNF441, ZNF443, ZNF461, ZNF462, ZNF468, ZNF473, ZNF483, ZNF486, ZNF491, ZNF507, ZNF514, ZNF519, ZNF540, ZNF543, ZNF546, ZNF549, ZNF555, ZNF562, ZNF567, ZNF569, ZNF574, ZNF577, ZNF596, ZNF610, ZNF616, ZNF621, ZNF626, ZNF627, ZNF629, ZNF630, ZNF630, ZNF641, ZNF645, ZNF658, ZNF660, ZNF662, ZNF677, ZNF682, ZNF697, ZNF703, ZNF705A, ZNF705B, ZNF705G, ZNF716, ZNF729, ZNF750, ZNF75A, ZNF765, ZNF771, ZNF773, ZNF774, ZNF778, ZNF784, ZNF789, ZNF804B, ZNF816, ZNF823, ZNF83, ZNF831, ZNF846, ZNF852, ZNF879, ZNF91, ZNF93, ZNF99, ZNF99, ZSCAN16, ZSCAN2, ZSCAN21, ZSCAN5A, and ZSCAN5B.

154. The pharmaceutical composition of claim 151 or claim 152, wherein the one or more genes are selected from the list consisting of: BMP4, E2F7, ESRRG, LYL1, STAT5A, THAP10, ZNF362, ZSCAN1, ANHX, CPEB1, CSRNP1, EN2, EPAS1, IRX3, LHX8, NR5A2, PRDM16, RAX2, SCML4, SMAD1, SOX6, SUV39H1, TFDP1, ZNF287, ZNF438, ZNF681, and ZNF853.

155. The pharmaceutical composition of claim 151 or claim 152, wherein the one or more genes are selected from the list consisting of: BMP4, E2F7, ESRRG, LYL1, STAT5A, THAP10, ZNF362, and ZSCAN1.

156. A method for treating a disease in a subject in need thereof, comprising administering to the subject the DNA-targeting system of any of claims 1-54, the gRNA of any of claims 55-81, the CRISPR Cas-gRNA combination of any of claims 82-91, the polynucleotide of claim 92, the plurality of polynucleotides of claim 93, the vector of any of claims 94-103, the modified T cell of any of claims 104-120 and 134, the pharmaceutical composition of any of claims 142-155, or a portion or a component of any of the foregoing.

157. Use of the DNA-targeting system of any of claims 1-54, the gRNA of any of claims 55-81, the CRISPR Cas-gRNA combination of any of claims 82-91, the polynucleotide of claim 92, the plurality of polynucleotides of claim 93, the vector of any of claims 94-103, the modified T cell of any of claims 104-120 and 134, the pharmaceutical composition of any of claims 142-155, or a portion or a component of any of the foregoing, for the treatment of a disease or disorder.

158. Use of the DNA-targeting system of any of claims 1-54, the gRNA of any of claims 55-81, the CRISPR Cas-gRNA combination of any of claims 82-91, the polynucleotide of claim 92, the plurality of polynucleotides of claim 93, the vector of any of claims 94-103, the modified T cell of any of claims 104-120 and 134, the pharmaceutical composition of any of claims 142-155, or a portion or a component of any of the foregoing, in the manufacture of a medicament for treating a disorder.

159. A composition comprising the DNA-targeting system of any of claims 1-54, the gRNA of any of claims 55-81, the CRISPR Cas-gRNA combination of any of claims 82-91, the polynucleotide of claim 92, the plurality of polynucleotides of claim 93, the vector of any of claims 94-103, the modified T cell of any of claims 104-120 and 134, the pharmaceutical composition of any of claims 142-155, or a portion or a component of any of the foregoing, for the treatment of a disease or a disorder.

The application's sequence listing, which the Patent Office published only in electronic form, follows.

SEQUENCE LISTING (1521 sequences)

SEQ ID NO: 1 - DNA, 19 bp, synthetic construct
  misc_feature 1..19: note = gRNA BMP4_a spacer DNA sequence
  source 1..19: mol_type = other DNA
gacagccggcgagcagggg

SEQ ID NO: 2 - DNA, 19 bp, synthetic construct
  misc_feature 1..19: note = gRNA E2F7_a spacer DNA sequence
  source 1..19: mol_type = other DNA
ttagcggggactacgatcc

SEQ ID NO: 3 - DNA, 19 bp, synthetic construct
  misc_feature 1..19: note = gRNA ESRRG_a spacer DNA sequence
  source 1..19: mol_type = other DNA
tggagcccgccgcctccag

SEQ ID NO: 4 - DNA, 19 bp, synthetic construct
  misc_feature 1..19: note = gRNA LYL1_a spacer DNA sequence
  source 1..19: mol_type = other DNA
gtttcctccctctcacccc

SEQ ID NO: 5 - DNA, 19 bp, synthetic construct
  misc_feature 1..19: note = gRNA STAT5A_a spacer DNA sequence
  source 1..19: mol_type = other DNA
ccgcggtccagggataggt

SEQ ID NO: 6 - DNA, 19 bp, synthetic construct
  misc_feature 1..19: note = gRNA THAP10_a spacer DNA sequence
  source 1..19: mol_type = other DNA
cttccggtgaccagaggta

SEQ ID NO: 7 - DNA, 19 bp, synthetic construct
  misc_feature 1..19: note = gRNA ZNF362_a spacer DNA sequence
  source 1..19: mol_type = other DNA
gggtaggaagtgtctcccg

SEQ ID NO: 8 - DNA, 19 bp, synthetic construct
  misc_feature 1..19: note = gRNA ZSCAN1_a spacer DNA sequence
  source 1..19: mol_type = other DNA
ccgcgcgcgggcttcgctc

SEQ ID NO: 9 - DNA, 19 bp, synthetic construct
  misc_feature 1..19: note = gRNA ANHX_a spacer DNA sequence
  source 1..19: mol_type = other DNA
cggaaggtgaggggcgcta

SEQ ID NO: 10 - DNA, 19 bp, synthetic construct
  misc_feature 1..19: note = gRNA CPEB1_a spacer DNA sequence
  source 1..19: mol_type = other DNA
caacatcgtcttccatgtc

SEQ ID NO: 11 - DNA, 19 bp, synthetic construct
  misc_feature 1..19: note = gRNA CSRNP1_a spacer DNA sequence
  source 1..19: mol_type = other DNA
tctgcgcgtccggcagcgg

SEQ ID NO: 12 - DNA, 19 bp, synthetic construct
  misc_feature 1..19: note = gRNA EN2_a spacer DNA sequence
  source 1..19: mol_type = other DNA
ctccgtgtgcgccgcggga

SEQ ID NO: 13 - DNA, 19 bp, synthetic construct
  misc_feature 1..19: note = gRNA EPAS1_a spacer DNA sequence
  source 1..19: mol_type = other DNA
cgccccagcgctcctgagg

SEQ ID NO: 14 - DNA, 19 bp, synthetic construct
  misc_feature 1..19: note = gRNA IRX3_a spacer DNA sequence
  source 1..19: mol_type = other DNA
aagcagcggaagcgatcct

SEQ ID NO: 15 - DNA, 19 bp, synthetic construct
  misc_feature 1..19: note = gRNA LHX8_a spacer DNA sequence
  source 1..19: mol_type = other DNA
cgagctaccagcgctcggg

SEQ ID NO: 16 - DNA, 19 bp, synthetic construct
  misc_feature 1..19: note = gRNA NR5A2_a spacer DNA sequence
  source 1..19: mol_type = other DNA
agcatgacaaggcgaccgc

SEQ ID NO: 17 - DNA, 19 bp, synthetic construct
  misc_feature 1..19: note = gRNA PRDM16_a spacer DNA sequence
  source 1..19: mol_type = other DNA
accatgcgatccaaggcga

SEQ ID NO: 18 - DNA, 19 bp, synthetic construct
  misc_feature 1..19: note = gRNA RAX2_a spacer DNA sequence
  source 1..19: mol_type = other DNA
ccggagccgagccaggtcg

SEQ ID NO: 19 - DNA, 19 bp, synthetic construct
  misc_feature 1..19: note = gRNA SCML4_a spacer DNA sequence
  source 1..19: mol_type = other DNA
tgtgagctactaacacggg

SEQ ID NO: 20 - DNA, 19 bp, synthetic construct
  misc_feature 1..19: note = gRNA SMAD1_a spacer DNA sequence
  source 1..19: mol_type = other DNA
gctcctccgagcagacggg

SEQ ID NO: 21 - DNA, 19 bp, synthetic construct
  misc_feature 1..19: note = gRNA SOX6_a spacer DNA sequence
  source 1..19: mol_type = other DNA
tctagccagcccctaagtc

SEQ ID NO: 22 - DNA, 19 bp, synthetic construct
  misc_feature 1..19: note = gRNA SUV39H1_a spacer DNA sequence
  source 1..19: mol_type = other DNA
tcttctcgcgaggccggct

SEQ ID NO: 23 - DNA, 19 bp, synthetic construct
  misc_feature 1..19: note = gRNA TFDP1_a spacer DNA sequence
  source 1..19: mol_type = other DNA
tcccggcgccactcggccc

SEQ ID NO: 24 - DNA, 19 bp, synthetic construct
  misc_feature 1..19: note = gRNA ZNF287_a spacer DNA sequence
  source 1..19: mol_type = other DNA
cagaggcgccggggtttct

SEQ ID NO: 25 - DNA, 19 bp, synthetic construct
  misc_feature 1..19: note = gRNA ZNF438_a spacer DNA sequence
  source 1..19: mol_type = other DNA
gtcacgggcccagcagtcg

SEQ ID NO: 26 - DNA, 19 bp, synthetic construct
  misc_feature 1..19: note = gRNA ZNF681_a spacer DNA sequence
  source 1..19: mol_type = other DNA
aggagaaaggacgcccggg

SEQ ID NO: 27 - DNA, 19 bp, synthetic construct
  misc_feature 1..19: note = gRNA ZNF853_a spacer DNA sequence
  source 1..19: mol_type = other DNA
cctctgcgctagggaggtg

SEQ ID NO: 28 - DNA, 19 bp, synthetic construct
  misc_feature 1..19: note = gRNA BMP4_b spacer DNA sequence
  source 1..19: mol_type = other DNA
gaggaaggaagatgcgaga

SEQ ID NO: 29 - DNA, 19 bp, synthetic construct
  misc_feature 1..19: note = gRNA CARF_a spacer DNA sequence
  source 1..19: mol_type = other DNA
tcccaaccagaggctcact

SEQ ID NO: 30 - DNA, 19 bp, synthetic construct
  misc_feature 1..19: note = gRNA ESRRG_b spacer DNA sequence
  source 1..19: mol_type = other DNA
tcttcagctataccaagag

SEQ ID NO: 31 - DNA, 19 bp, synthetic construct
  misc_feature 1..19: note = gRNA ESRRG_c spacer DNA sequence
  source 1..19: mol_type = other DNA
tgtgttgtagtgatcatgt

SEQ ID NO: 32 - DNA, 19 bp, synthetic construct
  misc_feature 1..19: note = gRNA FOXR2_a spacer DNA sequence
  source 1..19: mol_type = other DNA
atctagggagcttatcagt

SEQ ID NO: 33 - DNA, 19 bp, synthetic construct
  misc_feature 1..19: note = gRNA HOXA7_a spacer DNA sequence
  source 1..19: mol_type = other DNA
gccgtagccggacgcaaag

SEQ ID NO: 34 - DNA, 19 bp, synthetic construct
  misc_feature 1..19: note = gRNA IRF9_a spacer DNA sequence
  source 1..19: mol_type = other DNA
ggtaagatcagccaaggat

SEQ ID NO: 35 - DNA, 19 bp, synthetic construct
  misc_feature 1..19: note = gRNA KAT5_a spacer DNA sequence
  source 1..19: mol_type = other DNA
gaagtgacgtctcccagag

SEQ ID NO: 36 - DNA, 19 bp, synthetic construct
  misc_feature 1..19: note = gRNA KLF5_a spacer DNA sequence
  source 1..19: mol_type = other DNA
agagcctgagagcacggtg

SEQ ID NO: 37 - DNA, 19 bp, synthetic construct
  misc_feature 1..19: note = gRNA NEUROD1_a spacer DNA sequence
  source 1..19: mol_type = other DNA
caggacctactaacaacaa

SEQ ID NO: 38 - DNA, 19 bp, synthetic construct
  misc_feature 1..19: note = gRNA PAX6_a spacer DNA sequence
  source 1..19: mol_type = other DNA
atgttgcggagtgattagt

SEQ ID NO: 39 - DNA, 19 bp, synthetic construct
  misc_feature 1..19: note = gRNA PIN1_a spacer DNA sequence
  source 1..19: mol_type = other DNA
tgcgcttctcccagccggg

SEQ ID NO: 40 - DNA, 19 bp, synthetic construct
  misc_feature 1..19: note = gRNA PURG_a spacer DNA sequence
  source 1..19: mol_type = other DNA
ggtgtccgaagtcaggcgg

SEQ ID NO: 41 - DNA, 19 bp, synthetic construct
  misc_feature 1..19: note = gRNA PURG_b spacer DNA sequence
  source 1..19: mol_type = other DNA
tggtcgtgaagggcatcgg

SEQ ID NO: 42 - DNA, 19 bp, synthetic construct
  misc_feature 1..19: note = gRNA RARA_a spacer DNA sequence
  source 1..19: mol_type = other DNA
catagcgagtcacgtgcgg

SEQ ID NO: 43 - DNA, 19 bp, synthetic construct
  misc_feature 1..19: note = gRNASNAPC5_aspacer DNA sequence
  source 1..19: mol_type = other DNA
tgccgggccgacagcagcc

SEQ ID NO: 44 - DNA, 19 bp, synthetic construct
  misc_feature 1..19: note = gRNASTAT5A_ bspacer DNA sequence
  source 1..19: mol_type = other DNA
cctcataagtaactaggct

SEQ ID NO: 45 - DNA, 19 bp, synthetic construct
  misc_feature 1..19: note = gRNATBX22_aspacer DNA sequence
  source 1..19: mol_type = other DNA
ttagtgggacatcagtaca

SEQ ID NO: 46 - DNA, 19 bp, synthetic construct
  misc_feature 1..19: note = gRNAWT1_aspacer DNA sequence
  source 1..19: mol_type = other DNA
caaggcagcgcccacaccc

SEQ ID NO: 47 - DNA, 19 bp, synthetic construct
  misc_feature 1..19: note = gRNA ZNF138_a spacer DNA sequence
  source 1..19: mol_type = other DNA
tgcgtcctcttactcctag

SEQ ID NO: 48 - DNA, 19 bp, synthetic construct
  misc_feature 1..19: note = gRNA ZNF143_a spacer DNA sequence
  source 1..19: mol_type = other DNA
tgtcctggtgcatggtggt

SEQ ID NO: 49 - DNA, 19 bp, synthetic construct
  misc_feature 1..19: note = gRNA ZNF205_a spacer DNA sequence
  source 1..19: mol_type = other DNA
ctccacagcctgcacgggg

SEQ ID NO: 50 - DNA, 19 bp, synthetic construct
  misc_feature 1..19: note = gRNA ZNF235_a spacer DNA sequence
  source 1..19: mol_type = other DNA
agagggctcggagaagtct

SEQ ID NO: 51 - DNA, 19 bp, synthetic construct
  misc_feature 1..19: note = gRNA ZNF526_a spacer DNA sequence
  source 1..19: mol_type = other DNA
gattggtcgccacgggtaa

SEQ ID NO: 52 - DNA, 19 bp, synthetic construct
  misc_feature 1..19: note = gRNA ZNF548_a spacer DNA sequence
  source 1..19: mol_type = other DNA
agcactgggaggaccggtc

SEQ ID NO: 53 - DNA, 19 bp, synthetic construct
  misc_feature 1..19: note = gRNA ZNF559_a spacer DNA sequence
  source 1..19: mol_type = other DNA
ctgtcctcaggggtcgagg

SEQ ID NO: 54 - DNA, 19 bp, synthetic construct
  misc_feature 1..19: note = gRNA ZNF611_a spacer DNA sequence
  source 1..19: mol_type = other DNA
tgcgctaactaggttccca

SEQ ID NO: 55 - DNA, 19 bp, synthetic construct
  misc_feature 1..19: note = gRNA ZNF655_a spacer DNA sequence
  source 1..19: mol_type = other DNA
ccgcgaggtgaatgaacca

SEQ ID NO: 56 - DNA, 19 bp, synthetic construct
  misc_feature 1..19: note = gRNA ZNF672_a spacer DNA sequence
  source 1..19: mol_type = other DNA
caccggttgctgggaagac

SEQ ID NO: 57 - DNA, 19 bp, synthetic construct
  misc_feature 1..19: note = gRNA ZNF699_a spacer DNA sequence
  source 1..19: mol_type = other DNA
cggacaaggagtggcgggg

SEQ ID NO: 58 - DNA, 19 bp, synthetic construct
  misc_feature 1..19: note = gRNA ZNF706_a spacer DNA sequence
  source 1..19: mol_type = other DNA
cactctggcagctgaccgg

SEQ ID NO: 59 - DNA, 19 bp, synthetic construct
  misc_feature 1..19: note = gRNA ZNF714_a spacer DNA sequence
  source 1..19: mol_type = other DNA
ctgacctggagtcctctca

SEQ ID NO: 60 - DNA, 19 bp, synthetic construct
  misc_feature 1..19: note = gRNA ZNF772_a spacer DNA sequence
  source 1..19: mol_type = other DNA
tagtccacaggcctgatgg

SEQ ID NO: 61 - DNA, 19 bp, synthetic construct
  misc_feature 1..19: note = gRNA ZNF782_a spacer DNA sequence
  source 1..19: mol_type = other DNA
gggtcggctcggaaagtag

SEQ ID NO: 62 - DNA, 19 bp, synthetic construct
  misc_feature 1..19: note = gRNA ZSCAN1_a spacer DNA sequence
  source 1..19: mol_type = other DNA
tcgccgtaggggagggaag

SEQ ID NO: 63 - DNA, 19 bp, synthetic construct
  misc_feature 1..19: note = gRNA ZSCAN26_a spacer DNA sequence
  source 1..19: mol_type = other DNA
tccttctgcgatgcctaag

SEQ ID NO: 64 - DNA, 19 bp, synthetic construct
  misc_feature 1..19: note = gRNA ADNP_a spacer DNA sequence
  source 1..19: mol_type = other DNA
tgtctgctgaggggagacg

SEQ ID NO: 65 - DNA, 19 bp, synthetic construct
  misc_feature 1..19: note = gRNA AHRR_a spacer DNA sequence
  source 1..19: mol_type = other DNA
gccagggcgcgctgccccg

SEQ ID NO: 66 - DNA, 19 bp, synthetic construct
  misc_feature 1..19: note = gRNA AKNA_a spacer DNA sequence
  source 1..19: mol_type = other DNA
ccaggaaaccacccgcgct

SEQ ID NO: 67 - DNA, 19 bp, synthetic construct
  misc_feature 1..19: note = gRNA ALX3_a spacer DNA sequence
  source 1..19: mol_type = other DNA
cctgcacccggcccctatg

SEQ ID NO: 68 - DNA, 19 bp, synthetic construct
  misc_feature 1..19: note = gRNA ALX4_a spacer DNA sequence
  source 1..19: mol_type = other DNA
tgcgacaccgggctgtagt

SEQ ID NO: 69 - DNA, 19 bp, synthetic construct
  misc_feature 1..19: note = gRNA ANHX_b spacer DNA sequence
  source 1..19: mol_type = other DNA
aagcgggtcccggagggtg

SEQ ID NO: 70 - DNA, 19 bp, synthetic construct
  misc_feature 1..19: note = gRNA AR_a spacer DNA sequence
  source 1..19: mol_type = other DNA
gcttgctgggagagcggga

SEQ ID NO: 71 - DNA, 19 bp, synthetic construct
  misc_feature 1..19: note = gRNA ARHGAP35_a spacer DNA sequence
  source 1..19: mol_type = other DNA
cagtgtggtgggattatct

SEQ ID NO: 72 - DNA, 19 bp, synthetic construct
  misc_feature 1..19: note = gRNA ARID3C_a spacer DNA sequence
  source 1..19: mol_type = other DNA
agaggtatcaggcagagac

SEQ ID NO: 73 - DNA, 19 bp, synthetic construct
  misc_feature 1..19: note = gRNA ARID5B_a spacer DNA sequence
  source 1..19: mol_type = other DNA
agaaagaggagcagcgccc

SEQ ID NO: 74 - DNA, 19 bp, synthetic construct
  misc_feature 1..19: note = gRNA ASCL5_a spacer DNA sequence
  source 1..19: mol_type = other DNA
tggctcccggtgctgtggc

SEQ ID NO: 75 - DNA, 19 bp, synthetic construct
  misc_feature 1..19: note = gRNA ATF6B_a spacer DNA sequence
  source 1..19: mol_type = other DNA
ggccttgggaaccgtctcc

SEQ ID NO: 76 - DNA, 19 bp, synthetic construct
  misc_feature 1..19: note = gRNA ATOH7_a spacer DNA sequence
  source 1..19: mol_type = other DNA
cttcctgcaaaggagtctc

SEQ ID NO: 77 - DNA, 19 bp, synthetic construct
  misc_feature 1..19: note = gRNA BARHL1_a spacer DNA sequence
  source 1..19: mol_type = other DNA
tctaatgcgcagaggaggt

SEQ ID NO: 78 - DNA, 19 bp, synthetic construct
  misc_feature 1..19: note = gRNA BARHL2_a spacer DNA sequence
  source 1..19: mol_type = other DNA
tttcttcgctggttcgggg

SEQ ID NO: 79 - DNA, 19 bp, synthetic construct
  misc_feature 1..19: note = gRNA BATF_a spacer DNA sequence
  source 1..19: mol_type = other DNA
cagagtgaggaggacgcag

SEQ ID NO: 80 - DNA, 19 bp, synthetic construct
  misc_feature 1..19: note = gRNA BBX_a spacer DNA sequence
  source 1..19: mol_type = other DNA
agccctcagcggccagtca

SEQ ID NO: 81 - DNA, 19 bp, synthetic construct
  misc_feature 1..19: note = gRNA BHLHE40_a spacer DNA sequence
  source 1..19: mol_type = other DNA
tccgactcagcgcacagac

SEQ ID NO: 82 - DNA, 19 bp, synthetic construct
  misc_feature 1..19: note = gRNA BNC2_a spacer DNA sequence
  source 1..19: mol_type = other DNA
agaggagaccaagaggcgg

SEQ ID NO: 83 - DNA, 19 bp, synthetic construct
  misc_feature 1..19: note = gRNA BRD4_a spacer DNA sequence
  source 1..19: mol_type = other DNA
cagtggcaacacccacaag

SEQ ID NO: 84 - DNA, 19 bp, synthetic construct
  misc_feature 1..19: note = gRNA BRD9_a spacer DNA sequence
  source 1..19: mol_type = other DNA
ccagcgagctcggcaacct

SEQ ID NO: 85 - DNA, 19 bp, synthetic construct
  misc_feature 1..19: note = gRNA BSX_a spacer DNA sequence
  source 1..19: mol_type = other DNA
gacaagggccgggacgaag

SEQ ID NO: 86 - DNA, 19 bp, synthetic construct
  misc_feature 1..19: note = gRNA CCDC17_a spacer DNA sequence
  source 1..19: mol_type = other DNA
tgggtggctaacagagctg

SEQ ID NO: 87 - DNA, 19 bp, synthetic construct
  misc_feature 1..19: note = gRNA CDX1_a spacer DNA sequence
  source 1..19: mol_type = other DNA
cggttgctcgtcgtcgggg

SEQ ID NO: 88 - DNA, 19 bp, synthetic construct
  misc_feature 1..19: note = gRNA CDX2_a spacer DNA sequence
  source 1..19: mol_type = other DNA
ccttcccactaggctgcag

SEQ ID NO: 89 - DNA, 19 bp, synthetic construct
  misc_feature 1..19: note = gRNA CDX4_a spacer DNA sequence
  source 1..19: mol_type = other DNA
gtttcttacgagggtatcc

SEQ ID NO: 90 - DNA, 19 bp, synthetic construct
  misc_feature 1..19: note = gRNA CEBPB_a spacer DNA sequence
  source 1..19: mol_type = other DNA
gtggccgctattagtgagg

SEQ ID NO: 91 - DNA, 19 bp, synthetic construct
  misc_feature 1..19: note = gRNACENPB_aspacer DNA sequence
  source 1..19: mol_type = other DNA
cgggccgggggcacctccg

SEQ ID NO: 92 - DNA, 19 bp, synthetic construct
  misc_feature 1..19: note = gRNA CLOCK_a spacer DNA sequence
  source 1..19: mol_type = other DNA
cgccgccaaggaagccaac

SEQ ID NO: 93 - DNA, 19 bp, synthetic construct
  misc_feature 1..19: note = gRNA CREB3_a spacer DNA sequence
  source 1..19: mol_type = other DNA
tgggaggcgggtccggaga

SEQ ID NO: 94 - DNA, 19 bp, synthetic construct
  misc_feature 1..19: note = gRNA CREB3L4_a spacer DNA sequence
  source 1..19: mol_type = other DNA
aaagcgagggctacagaac

SEQ ID NO: 95 - DNA, 19 bp, synthetic construct
  misc_feature 1..19: note = gRNA CSRNP3_a spacer DNA sequence
  source 1..19: mol_type = other DNA
cacggcatcagcctcactg

SEQ ID NO: 96 - DNA, 19 bp, synthetic construct
  misc_feature 1..19: note = gRNA CTCF_a spacer DNA sequence
  source 1..19: mol_type = other DNA
cgcggagctgcttctttgg

SEQ ID NO: 97 - DNA, 19 bp, synthetic construct
  misc_feature 1..19: note = gRNA CUX1_a spacer DNA sequence
  source 1..19: mol_type = other DNA
tgagcggctgatagagagg

SEQ ID NO: 98 - DNA, 19 bp, synthetic construct
  misc_feature 1..19: note = gRNA CUX2_a spacer DNA sequence
  source 1..19: mol_type = other DNA
gcgcgccctgggcgcattg

SEQ ID NO: 99 - DNA, 19 bp, synthetic construct
  misc_feature 1..19: note = gRNA DACH2_a spacer DNA sequence
  source 1..19: mol_type = other DNA
ggcccggaataagcccccc

SEQ ID NO: 100 - DNA, 19 bp, synthetic construct
  misc_feature 1..19: note = gRNA DLX1_a spacer DNA sequence
  source 1..19: mol_type = other DNA
ctccccaggaaccaaccag

SEQ ID NO: 101 - DNA, 19 bp, synthetic construct
  misc_feature 1..19: note = gRNA DLX4_a spacer DNA sequence
  source 1..19: mol_type = other DNA
aagcggaagccagcacgca

SEQ ID NO: 102 - DNA, 19 bp, synthetic construct
  misc_feature 1..19: note = gRNA DLX5_a spacer DNA sequence
  source 1..19: mol_type = other DNA
gccgcggcgaggaggagac

SEQ ID NO: 103 - DNA, 19 bp, synthetic construct
  misc_feature 1..19: note = gRNA DLX6_a spacer DNA sequence
  source 1..19: mol_type = other DNA
gagtggctcatgtaggggt

SEQ ID NO: 104 - DNA, 19 bp, synthetic construct
  misc_feature 1..19: note = gRNA DMRTB1_a spacer DNA sequence
  source 1..19: mol_type = other DNA
aggctgggcatcgccacgg

SEQ ID NO: 105 - DNA, 19 bp, synthetic construct
  misc_feature 1..19: note = gRNA DNMT3B_a spacer DNA sequence
  source 1..19: mol_type = other DNA
gactcgcccccaatcctgg

SEQ ID NO: 106 - DNA, 19 bp, synthetic construct
  misc_feature 1..19: note = gRNA DOT1L_a spacer DNA sequence
  source 1..19: mol_type = other DNA
gcttcacgccggcccaaga

SEQ ID NO: 107 - DNA, 19 bp, synthetic construct
  misc_feature 1..19: note = gRNA DPF1_a spacer DNA sequence
  source 1..19: mol_type = other DNA
ctacgatttcattcattct

SEQ ID NO: 108 - DNA, 19 bp, synthetic construct
  misc_feature 1..19: note = gRNA DR1_a spacer DNA sequence
  source 1..19: mol_type = other DNA
gtagcccgaacgcagatcg

SEQ ID NO: 109 - DNA, 19 bp, synthetic construct
  misc_feature 1..19: note = gRNA E2F2_a spacer DNA sequence
  source 1..19: mol_type = other DNA
gcgatgcgctgggatgggg

SEQ ID NO: 110 - DNA, 19 bp, synthetic construct
  misc_feature 1..19: note = gRNA E2F3_a spacer DNA sequence
  source 1..19: mol_type = other DNA
cccggagggccgaacagac

SEQ ID NO: 111 - DNA, 19 bp, synthetic construct
  misc_feature 1..19: note = gRNA EBF3_a spacer DNA sequence
  source 1..19: mol_type = other DNA
ggaaagggtccattcctcg

SEQ ID NO: 112 - DNA, 19 bp, synthetic construct
  misc_feature 1..19: note = gRNA EGR2_a spacer DNA sequence
  source 1..19: mol_type = other DNA
cagcagccggaacacagac

SEQ ID NO: 113 - DNA, 19 bp, synthetic construct
  misc_feature 1..19: note = gRNA EHF_a spacer DNA sequence
  source 1..19: mol_type = other DNA
aatctcaccagctcctata

SEQ ID NO: 114 - DNA, 19 bp, synthetic construct
  misc_feature 1..19: note = gRNA ELF5_a spacer DNA sequence
  source 1..19: mol_type = other DNA
gtggctaggtccaaagagg

SEQ ID NO: 115 - DNA, 19 bp, synthetic construct
  misc_feature 1..19: note = gRNA ELF5_b spacer DNA sequence
  source 1..19: mol_type = other DNA
aggctttcaaggcaagaga

SEQ ID NO: 116 - DNA, 19 bp, synthetic construct
  misc_feature 1..19: note = gRNA ELMSAN1_a spacer DNA sequence
  source 1..19: mol_type = other DNA
gcgccgttggcctgaggta

SEQ ID NO: 117 - DNA, 19 bp, synthetic construct
  misc_feature 1..19: note = gRNA EMX1_a spacer DNA sequence
  source 1..19: mol_type = other DNA
aggccgctagaatggaccc

SEQ ID NO: 118 - DNA, 19 bp, synthetic construct
  misc_feature 1..19: note = gRNA ETS2_a spacer DNA sequence
  source 1..19: mol_type = other DNA
ctccagagactgacgagtg

SEQ ID NO: 119 - DNA, 19 bp, synthetic construct
  misc_feature 1..19: note = gRNA ETV4_a spacer DNA sequence
  source 1..19: mol_type = other DNA
cctcaggtgaggctgcggg

SEQ ID NO: 120 - DNA, 19 bp, synthetic construct
  misc_feature 1..19: note = gRNA ETV4_b spacer DNA sequence
  source 1..19: mol_type = other DNA
cttttgtgaatggaacccc

SEQ ID NO: 121 - DNA, 19 bp, synthetic construct
  misc_feature 1..19: note = gRNA ETV6_a spacer DNA sequence
  source 1..19: mol_type = other DNA
cggctgccgggagagatgc

SEQ ID NO: 122 - DNA, 19 bp, synthetic construct
  misc_feature 1..19: note = gRNA EZH1_a spacer DNA sequence
  source 1..19: mol_type = other DNA
acccgcggctcgggatgga

SEQ ID NO: 123 - DNA, 19 bp, synthetic construct
  misc_feature 1..19: note = gRNA FERD3L_a spacer DNA sequence
  source 1..19: mol_type = other DNA
cacatccattggcagatgg

SEQ ID NO: 124 - DNA, 19 bp, synthetic construct
  misc_feature 1..19: note = gRNA FERD3L_b spacer DNA sequence
  source 1..19: mol_type = other DNA
aacaaggaactgtcccggg

SEQ ID NO: 125 - DNA, 19 bp, synthetic construct
  misc_feature 1..19: note = gRNA FIZ1_a spacer DNA sequence
  source 1..19: mol_type = other DNA
ccgacattttgggcagcgg

SEQ ID NO: 126 - DNA, 19 bp, synthetic construct
  misc_feature 1..19: note = gRNA FOS_a spacer DNA sequence
  source 1..19: mol_type = other DNA
tagtaagagaggctatccc

SEQ ID NO: 127 - DNA, 19 bp, synthetic construct
  misc_feature 1..19: note = gRNA FOSB_a spacer DNA sequence
  source 1..19: mol_type = other DNA
cagagctacggccacggca

SEQ ID NO: 128 - DNA, 19 bp, synthetic construct
  misc_feature 1..19: note = gRNA FOXA1_a spacer DNA sequence
  source 1..19: mol_type = other DNA
gcagcccgctcacttcccg

SEQ ID NO: 129 - DNA, 19 bp, synthetic construct
  misc_feature 1..19: note = gRNA FOXA2_a spacer DNA sequence
  source 1..19: mol_type = other DNA
agctactatgcagagcccg

SEQ ID NO: 130 - DNA, 19 bp, synthetic construct
  misc_feature 1..19: note = gRNA FOXA3_a spacer DNA sequence
  source 1..19: mol_type = other DNA
ctcgggacagccgtacccc

SEQ ID NO: 131 - DNA, 19 bp, synthetic construct
  misc_feature 1..19: note = gRNA FOXC2_a spacer DNA sequence
  source 1..19: mol_type = other DNA
cggcgctcgggccgagcag

SEQ ID NO: 132 - DNA, 19 bp, synthetic construct
  misc_feature 1..19: note = gRNA FOXD3_a spacer DNA sequence
  source 1..19: mol_type = other DNA
cgcagggtgcaggccgtag

SEQ ID NO: 133 - DNA, 19 bp, synthetic construct
  misc_feature 1..19: note = gRNA FOXE1_a spacer DNA sequence
  source 1..19: mol_type = other DNA
tcccctgcacacaccggac

SEQ ID NO: 134 - DNA, 19 bp, synthetic construct
  misc_feature 1..19: note = gRNA FOXJ3_a spacer DNA sequence
  source 1..19: mol_type = other DNA
ggcctcgaccgctcgcagt

SEQ ID NO: 135 - DNA, 19 bp, synthetic construct
  misc_feature 1..19: note = gRNA FOXN2_a spacer DNA sequence
  source 1..19: mol_type = other DNA
agtcgcctccgggaagacg

SEQ ID NO: 136 - DNA, 19 bp, synthetic construct
  misc_feature 1..19: note = gRNA FOXN4_a spacer DNA sequence
  source 1..19: mol_type = other DNA
acgcgaggggcgagcgcga

SEQ ID NO: 137 - DNA, 19 bp, synthetic construct
  misc_feature 1..19: note = gRNA FOXO1_a spacer DNA sequence
  source 1..19: mol_type = other DNA
ccgcaggagagccaagagg

SEQ ID NO: 138 - DNA, 19 bp, synthetic construct
  misc_feature 1..19: note = gRNA FOXP3_a spacer DNA sequence
  source 1..19: mol_type = other DNA
agagcagggacactcacct

SEQ ID NO: 139 - DNA, 19 bp, synthetic construct
  misc_feature 1..19: note = gRNA FOXS1_a spacer DNA sequence
  source 1..19: mol_type = other DNA
atgaccgcaagccaggcaa

SEQ ID NO: 140 - DNA, 19 bp, synthetic construct
  misc_feature 1..19: note = gRNA GATA2_a spacer DNA sequence
  source 1..19: mol_type = other DNA
gcgaggccagcgtcgcccc

SEQ ID NO: 141 - DNA, 19 bp, synthetic construct
  misc_feature 1..19: note = gRNA GATA3_a spacer DNA sequence
  source 1..19: mol_type = other DNA
tcgctacccaggttggtac

SEQ ID NO: 142 - DNA, 19 bp, synthetic construct
  misc_feature 1..19: note = gRNA GATAD2A_a spacer DNA sequence
  source 1..19: mol_type = other DNA
ctccatgtgtgcggccgag

SEQ ID NO: 143 - DNA, 19 bp, synthetic construct
  misc_feature 1..19: note = gRNA GCM2_a spacer DNA sequence
  source 1..19: mol_type = other DNA
caatggttatggacccggg

SEQ ID NO: 144 - DNA, 19 bp, synthetic construct
  misc_feature 1..19: note = gRNA GFI1_a spacer DNA sequence
  source 1..19: mol_type = other DNA
ggctcggcggacctacctg

SEQ ID NO: 145 - DNA, 19 bp, synthetic construct
  misc_feature 1..19: note = gRNA GLI2_a spacer DNA sequence
  source 1..19: mol_type = other DNA
ttgcttgccaaggggccca

SEQ ID NO: 146 - DNA, 19 bp, synthetic construct
  misc_feature 1..19: note = gRNA GLYR1_a spacer DNA sequence
  source 1..19: mol_type = other DNA
cggctgtgagtctgcggct

SEQ ID NO: 147 - DNA, 19 bp, synthetic construct
  misc_feature 1..19: note = gRNA GPBP1L1_a spacer DNA sequence
  source 1..19: mol_type = other DNA
cagcttgtcgacccggcag

SEQ ID NO: 148 - DNA, 19 bp, synthetic construct
  misc_feature 1..19: note = gRNA GRHL1_a spacer DNA sequence
  source 1..19: mol_type = other DNA
acagtacacccgatccggg

SEQ ID NO: 149 - DNA, 19 bp, synthetic construct
  misc_feature 1..19: note = gRNA GTF2B_a spacer DNA sequence
  source 1..19: mol_type = other DNA
gcctccgggcagcctcgta

SEQ ID NO: 150 - DNA, 19 bp, synthetic construct
  misc_feature 1..19: note = gRNA GTF2I_a spacer DNA sequence
  source 1..19: mol_type = other DNA
gcgaggggcccgtgcgtgt

SEQ ID NO: 151 - DNA, 19 bp, synthetic construct
  misc_feature 1..19: note = gRNA HDAC2_a spacer DNA sequence
  source 1..19: mol_type = other DNA
gctcggtaccacccggcag

SEQ ID NO: 152 - DNA, 19 bp, synthetic construct
  misc_feature 1..19: note = gRNA HES2_aspacer DNA sequence
  source 1..19: mol_type = other DNA
gggtctcaactgttacgtg

SEQ ID NO: 153 - DNA, 19 bp, synthetic construct
  misc_feature 1..19: note = gRNA HES7_aspacer DNA sequence
  source 1..19: mol_type = other DNA
ggaggagcaatggtcaccc

SEQ ID NO: 154 - DNA, 19 bp, synthetic construct
  misc_feature 1..19: note = gRNA HESX1_a spacer DNA sequence
  source 1..19: mol_type = other DNA
gctctgccccacgtgtata

SEQ ID NO: 155 - DNA, 19 bp, synthetic construct
  misc_feature 1..19: note = gRNA HEY1_aspacer DNA sequence
  source 1..19: mol_type = other DNA
gagctggacgagaccatcg

SEQ ID NO: 156 - DNA, 19 bp, synthetic construct
  misc_feature 1..19: note = gRNA HIF3A_aspacer DNA sequence
  source 1..19: mol_type = other DNA
tacgagtgggtgcgcacgg

SEQ ID NO: 157 - DNA, 19 bp, synthetic construct
  misc_feature 1..19: note = gRNA HIVEP3_aspacer DNA sequence
  source 1..19: mol_type = other DNA
ggagaactgtgttggaggg

SEQ ID NO: 158 - DNA, 19 bp, synthetic construct
  misc_feature 1..19: note = gRNA HLF_a spacer DNA sequence
  source 1..19: mol_type = other DNA
aggaaaagtgataaaagag

SEQ ID NO: 159 - DNA, 19 bp, synthetic construct
  misc_feature 1..19: note = gRNA HLX_a spacer DNA sequence
  source 1..19: mol_type = other DNA
gcagtaagcggccgaccag

SEQ ID NO: 160 - DNA, 19 bp, synthetic construct
  misc_feature 1..19: note = gRNA HMG20A_a spacer DNA sequence
  source 1..19: mol_type = other DNA
aagtgaaggcgattgagag

SEQ ID NO: 161 - DNA, 19 bp, synthetic construct
  misc_feature 1..19: note = gRNA HMGA2_a spacer DNA sequence
  source 1..19: mol_type = other DNA
atcaacaccggacgtccag

SEQ ID NO: 162 - DNA, 19 bp, synthetic construct
  misc_feature 1..19: note = gRNA HMGA2_b spacer DNA sequence
  source 1..19: mol_type = other DNA
ttcgggagatgaggtgata

SEQ ID NO: 163 - DNA, 19 bp, synthetic construct
  misc_feature 1..19: note = gRNA HMGA2_c spacer DNA sequence
  source 1..19: mol_type = other DNA
gtccctgggctgaagtgga

SEQ ID NO: 164 - DNA, 19 bp, synthetic construct
  misc_feature 1..19: note = gRNA HMGN3_a spacer DNA sequence
  source 1..19: mol_type = other DNA
cctcattggagcagcaggg

SEQ ID NO: 165 - DNA, 19 bp, synthetic construct
  misc_feature 1..19: note = gRNA HMX2_a spacer DNA sequence
  source 1..19: mol_type = other DNA
gggacatgcaggcaccgga

SEQ ID NO: 166 - DNA, 19 bp, synthetic construct
  misc_feature 1..19: note = gRNA HNF1A_a spacer DNA sequence
  source 1..19: mol_type = other DNA
atgtaaacagaacaggcag

SEQ ID NO: 167 - DNA, 19 bp, synthetic construct
  misc_feature 1..19: note = gRNA HNF4G_a spacer DNA sequence
  source 1..19: mol_type = other DNA
agattctatataattcaag

SEQ ID NO: 168 - DNA, 19 bp, synthetic construct
  misc_feature 1..19: note = gRNA HNF4G_b spacer DNA sequence
  source 1..19: mol_type = other DNA
agccgcccgaggggaaccg

SEQ ID NO: 169 - DNA, 19 bp, synthetic construct
  misc_feature 1..19: note = gRNA HOXA1_a spacer DNA sequence
  source 1..19: mol_type = other DNA
ttcttctccggccccatgg

SEQ ID NO: 170 - DNA, 19 bp, synthetic construct
  misc_feature 1..19: note = gRNA HOXA11_a spacer DNA sequence
  source 1..19: mol_type = other DNA
ggcgcgaagacggggtctg

SEQ ID NO: 171 - DNA, 19 bp, synthetic construct
  misc_feature 1..19: note = gRNA HOXB1_a spacer DNA sequence
  source 1..19: mol_type = other DNA
atactgccgaaaggttgta

SEQ ID NO: 172 - DNA, 19 bp, synthetic construct
  misc_feature 1..19: note = gRNA HOXB2_a spacer DNA sequence
  source 1..19: mol_type = other DNA
ggtggggagattttcccct

SEQ ID NO: 173 - DNA, 19 bp, synthetic construct
  misc_feature 1..19: note = gRNA HOXB3_a spacer DNA sequence
  source 1..19: mol_type = other DNA
ttaactgctcgctgtggtg

SEQ ID NO: 174 - DNA, 19 bp, synthetic construct
  misc_feature 1..19: note = gRNA HOXC12_a spacer DNA sequence
  source 1..19: mol_type = other DNA
acactgggctgccgaggta

SEQ ID NO: 175 - DNA, 19 bp, synthetic construct
  misc_feature 1..19: note = gRNA HOXC9_a spacer DNA sequence
  source 1..19: mol_type = other DNA
ccgtacgggtgatatacca

SEQ ID NO: 176 - DNA, 19 bp, synthetic construct
  misc_feature 1..19: note = gRNA HOXC9_a spacer DNA sequence
  source 1..19: mol_type = other DNA
ggcttgggcgcgaagctac

SEQ ID NO: 177 - DNA, 19 bp, synthetic construct
  misc_feature 1..19: note = gRNAHOXD9_a spacer DNA sequence
  source 1..19: mol_type = other DNA
cggcggacagtgtaatgtt

SEQ ID NO: 178 - DNA, 19 bp, synthetic construct
  misc_feature 1..19: note = gRNA HSF4_a spacer DNA sequence
  source 1..19: mol_type = other DNA
gcatggtgcagtctcggcc

SEQ ID NO: 179 - DNA, 19 bp, synthetic construct
  misc_feature 1..19: note = gRNA HSF5_a spacer DNA sequence
  source 1..19: mol_type = other DNA
cagggcgaggcgaaggccg

SEQ ID NO: 180 - DNA, 19 bp, synthetic construct
  misc_feature 1..19: note = gRNA IKZF1_a spacer DNA sequence
  source 1..19: mol_type = other DNA
tgcgccgcgcggggaccca

SEQ ID NO: 181 - DNA, 19 bp, synthetic construct
  misc_feature 1..19: note = gRNA IKZF2_a spacer DNA sequence
  source 1..19: mol_type = other DNA
gcagtggatctgtagctaa

SEQ ID NO: 182 - DNA, 19 bp, synthetic construct
  misc_feature 1..19: note = gRNA IKZF3_a spacer DNA sequence
  source 1..19: mol_type = other DNA
gcgcgctgagtccaggcga

SEQ ID NO: 183 - DNA, 19 bp, synthetic construct
  misc_feature 1..19: note = gRNA IKZF4_a spacer DNA sequence
  source 1..19: mol_type = other DNA
tccctcgccgtttccaagg

SEQ ID NO: 184 - DNA, 19 bp, synthetic construct
  misc_feature 1..19: note = gRNA IRF7_a spacer DNA sequence
  source 1..19: mol_type = other DNA
ctctggcacccaggtactg

SEQ ID NO: 185 - DNA, 19 bp, synthetic construct
  misc_feature 1..19: note = gRNA IRX3_a spacer DNA sequence
  source 1..19: mol_type = other DNA
gtaaggcagccaaaagttg

SEQ ID NO: 186 - DNA, 19 bp, synthetic construct
  misc_feature 1..19: note = gRNA ISL2_a spacer DNA sequence
  source 1..19: mol_type = other DNA
actaactcctactgccccg

SEQ ID NO: 187 - DNA, 19 bp, synthetic construct
  misc_feature 1..19: note = gRNA JRK_a spacer DNA sequence
  source 1..19: mol_type = other DNA
agtggccggcacttccggc

SEQ ID NO: 188 - DNA, 19 bp, synthetic construct
  misc_feature 1..19: note = gRNA JRK_b spacer DNA sequence
  source 1..19: mol_type = other DNA
tcctgaccgtcatcagcaa

SEQ ID NO: 189 - DNA, 19 bp, synthetic construct
  misc_feature 1..19: note = gRNA JRKL_a spacer DNA sequence
  source 1..19: mol_type = other DNA
gactgccgcgcgatagtca

SEQ ID NO: 190 - DNA, 19 bp, synthetic construct
  misc_feature 1..19: note = gRNA KAT7_a spacer DNA sequence
  source 1..19: mol_type = other DNA
gctccagacgctgagaggc

SEQ ID NO: 191 - DNA, 19 bp, synthetic construct
  misc_feature 1..19: note = gRNA KDM1A_a spacer DNA sequence
  source 1..19: mol_type = other DNA
cacggagcgacagagcgag

SEQ ID NO: 192 - DNA, 19 bp, synthetic construct
  misc_feature 1..19: note = gRNA KDM2B_a spacer DNA sequence
  source 1..19: mol_type = other DNA
ctcggcttccatacctata

SEQ ID NO: 193 - DNA, 19 bp, synthetic construct
  misc_feature 1..19: note = gRNA KDM5D_a spacer DNA sequence
  source 1..19: mol_type = other DNA
aactaggatccctgacgat

SEQ ID NO: 194 - DNA, 19 bp, synthetic construct
  misc_feature 1..19: note = gRNA KLF14_a spacer DNA sequence
  source 1..19: mol_type = other DNA
ctcggcggcgaagtagtcc

SEQ ID NO: 195 - DNA, 19 bp, synthetic construct
  misc_feature 1..19: note = gRNA KLF9_a spacer DNA sequence
  source 1..19: mol_type = other DNA
caagggagccggctcagag

SEQ ID NO: 196 - DNA, 19 bp, synthetic construct
  misc_feature 1..19: note = gRNA KMT2B_a spacer DNA sequence
  source 1..19: mol_type = other DNA
catcttggcaccgtgagag

SEQ ID NO: 197 - DNA, 19 bp, synthetic construct
  misc_feature 1..19: note = gRNA KMT2B_b spacer DNA sequence
  source 1..19: mol_type = other DNA
gggccaaaaaagtaaagat

SEQ ID NO: 198 - DNA, 19 bp, synthetic construct
  misc_feature 1..19: note = gRNA L3MBTL4_a spacer DNA sequence
  source 1..19: mol_type = other DNA
acgccgaccgagctacagg

SEQ ID NO: 199 - DNA, 19 bp, synthetic construct
  misc_feature 1..19: note = gRNA LEF1_a spacer DNA sequence
  source 1..19: mol_type = other DNA
gctctcgggccgaggaacc

SEQ ID NO: 200 - DNA, 19 bp, synthetic construct
  misc_feature 1..19: note = gRNA LHX6_a spacer DNA sequence
  source 1..19: mol_type = other DNA
agaagctggcggacatgac

SEQ ID NO: 201 - DNA, 19 bp, synthetic construct
  misc_feature 1..19: note = gRNA LHX9_a spacer DNA sequence
  source 1..19: mol_type = other DNA
gggaacttgcaagcagcca

SEQ ID NO: 202 - DNA, 19 bp, synthetic construct
  misc_feature 1..19: note = gRNA LIN28A_a spacer DNA sequence
  source 1..19: mol_type = other DNA
aagtccgaaggcaaagggt

SEQ ID NO: 203 - DNA, 19 bp, synthetic construct
  misc_feature 1..19: note = gRNA LIN28A_a spacer DNA sequence
  source 1..19: mol_type = other DNA
cgtgcgcgccagactacgt

SEQ ID NO: 204 - DNA, 19 bp, synthetic construct
  misc_feature 1..19: note = gRNA LMX1A_a spacer DNA sequence
  source 1..19: mol_type = other DNA
cctccggctgcagtctcgg

SEQ ID NO: 205 - DNA, 19 bp, synthetic construct
  misc_feature 1..19: note = gRNA MAF_a spacer DNA sequence
  source 1..19: mol_type = other DNA
agaggtgcagcccgactgg

SEQ ID NO: 206 - DNA, 19 bp, synthetic construct
  misc_feature 1..19: note = gRNA MAFF_a spacer DNA sequence
  source 1..19: mol_type = other DNA
cccggttcagagcgacctg

SEQ ID NO: 207 - DNA, 19 bp, synthetic construct
  misc_feature 1..19: note = gRNA MBD3_a spacer DNA sequence
  source 1..19: mol_type = other DNA
agaagtgcccagaaggtcg

SEQ ID NO: 208 - DNA, 19 bp, synthetic construct
  misc_feature 1..19: note = gRNA MBD4_a spacer DNA sequence
  source 1..19: mol_type = other DNA
ccggtgccgtgagctgaag

SEQ ID NO: 209 - DNA, 19 bp, synthetic construct
  misc_feature 1..19: note = gRNA MBNL2_a spacer DNA sequence
  source 1..19: mol_type = other DNA
gaaagccgtctgccgtatc

SEQ ID NO: 210 - DNA, 19 bp, synthetic construct
  misc_feature 1..19: note = gRNA MED1_a spacer DNA sequence
  source 1..19: mol_type = other DNA
aagaagagaagggtgctcg

SEQ ID NO: 211 - DNA, 19 bp, synthetic construct
  misc_feature 1..19: note = gRNA MED14_a spacer DNA sequence
  source 1..19: mol_type = other DNA
ctgcagaggaccttccgac

SEQ ID NO: 212 - DNA, 19 bp, synthetic construct
  misc_feature 1..19: note = gRNA MED23_a spacer DNA sequence
  source 1..19: mol_type = other DNA
aagcgacgccgaggagcta

SEQ ID NO: 213 - DNA, 19 bp, synthetic construct
  misc_feature 1..19: note = gRNA MED24_a spacer DNA sequence
  source 1..19: mol_type = other DNA
tgtgcggtaggcttaaatt

SEQ ID NO: 214 - DNA, 19 bp, synthetic construct
  misc_feature 1..19: note = gRNA MEF2C_a spacer DNA sequence
  source 1..19: mol_type = other DNA
tagcagcccgaagatgtct

SEQ ID NO: 215 - DNA, 19 bp, synthetic construct
  misc_feature 1..19: note = gRNA MEF2D_a spacer DNA sequence
  source 1..19: mol_type = other DNA
cgggagtcgaggccgacgt

SEQ ID NO: 216 - DNA, 19 bp, synthetic construct
  misc_feature 1..19: note = gRNA MEIS3_a spacer DNA sequence
  source 1..19: mol_type = other DNA
caacaccgcgggccgtcag

SEQ ID NO: 217 - DNA, 19 bp, synthetic construct
  misc_feature 1..19: note = gRNA MESP1_a spacer DNA sequence
  source 1..19: mol_type = other DNA
ctggagactctcctcgctg

SEQ ID NO: 218 - DNA, 19 bp, synthetic construct
  misc_feature 1..19: note = gRNA MESP1_b spacer DNA sequence
  source 1..19: mol_type = other DNA
gcctagcacggccgacagg

SEQ ID NO: 219 - DNA, 19 bp, synthetic construct
  misc_feature 1..19: note = gRNA MGA_a spacer DNA sequence
  source 1..19: mol_type = other DNA
gaccacaggggcgcgccaa

SEQ ID NO: 220 - DNA, 19 bp, synthetic construct
  misc_feature 1..19: note = gRNA MITF_a spacer DNA sequence
  source 1..19: mol_type = other DNA
ttggaattatagaaagtag

SEQ ID NO: 221 - DNA, 19 bp, synthetic construct
  misc_feature 1..19: note = gRNA MLX_a spacer DNA sequence
  source 1..19: mol_type = other DNA
ccttgacccaagggtcctc

SEQ ID NO: 222 - DNA, 19 bp, synthetic construct
  misc_feature 1..19: note = gRNA MNX1_a spacer DNA sequence
  source 1..19: mol_type = other DNA
gcgcgggtccccaccacgg

SEQ ID NO: 223 - DNA, 19 bp, synthetic construct
  misc_feature 1..19: note = gRNA MYF5_a spacer DNA sequence
  source 1..19: mol_type = other DNA
ccgatgggcaaatcccggg

SEQ ID NO: 224 - DNA, 19 bp, synthetic construct
  misc_feature 1..19: note = gRNA MYOG_a spacer DNA sequence
  source 1..19: mol_type = other DNA
cggggttcctggtagaagt

SEQ ID NO: 225 - DNA, 19 bp, synthetic construct
  misc_feature 1..19: note = gRNA MYPOP_a spacer DNA sequence
  source 1..19: mol_type = other DNA
ggagccggtgagtgacccg

SEQ ID NO: 226 - DNA, 19 bp, synthetic construct
  misc_feature 1..19: note = gRNA MYRFL_a spacer DNA sequence
  source 1..19: mol_type = other DNA
cttcattatcagaaagtag

SEQ ID NO: 227 - DNA, 19 bp, synthetic construct
  misc_feature 1..19: note = gRNA MYT1L_a spacer DNA sequence
  source 1..19: mol_type = other DNA
gtgcttcaacaagactgca

SEQ ID NO: 228 - DNA, 19 bp, synthetic construct
  misc_feature 1..19: note = gRNA NCOR1_a spacer DNA sequence
  source 1..19: mol_type = other DNA
tcccggggcagcagccgct

SEQ ID NO: 229 - DNA, 19 bp, synthetic construct
  misc_feature 1..19: note = gRNA NEUROG1_b spacer DNA sequence
  source 1..19: mol_type = other DNA
ctcgtgtgagcaccgagtg

SEQ ID NO: 230 - DNA, 19 bp, synthetic construct
  misc_feature 1..19: note = gRNA NFAT5_a spacer DNA sequence
  source 1..19: mol_type = other DNA
gtccccgtcccgccggggg

SEQ ID NO: 231 - DNA, 19 bp, synthetic construct
  misc_feature 1..19: note = gRNA NFATC2_a spacer DNA sequence
  source 1..19: mol_type = other DNA
gcgatccggcttactccag

SEQ ID NO: 232 - DNA, 19 bp, synthetic construct
  misc_feature 1..19: note = gRNA NFATC2_b spacer DNA sequence
  source 1..19: mol_type = other DNA
agaggctgcgttcagactg

SEQ ID NO: 233 - DNA, 19 bp, synthetic construct
  misc_feature 1..19: note = gRNA NFATC3_a spacer DNA sequence
  source 1..19: mol_type = other DNA
gaggcttaggcaccggtgg

SEQ ID NO: 234 - DNA, 19 bp, synthetic construct
  misc_feature 1..19: note = gRNA NFE2L1_a spacer DNA sequence
  source 1..19: mol_type = other DNA
ccctggaggctagaagctc

SEQ ID NO: 235 - DNA, 19 bp, synthetic construct
  misc_feature 1..19: note = gRNA NFE2L3_a spacer DNA sequence
  source 1..19: mol_type = other DNA
gggtccgcacgtgtcaccc

SEQ ID NO: 236 - DNA, 19 bp, synthetic construct
  misc_feature 1..19: note = gRNA NFIA_a spacer DNA sequence
  source 1..19: mol_type = other DNA
tccacgccgcggcttacct

SEQ ID NO: 237 - DNA, 19 bp, synthetic construct
  misc_feature 1..19: note = gRNA NFYB_a spacer DNA sequence
  source 1..19: mol_type = other DNA
ccccgggcccggagctcaa

SEQ ID NO: 238 - DNA, 19 bp, synthetic construct
  misc_feature 1..19: note = gRNA NKX1-2_a spacer DNA sequence
  source 1..19: mol_type = other DNA
cgggaagccaggaaaagtt

SEQ ID NO: 239 - DNA, 19 bp, synthetic construct
  misc_feature 1..19: note = gRNA NKX2-3_a spacer DNA sequence
  source 1..19: mol_type = other DNA
gtctgtcaaaagcccgact

SEQ ID NO: 240 - DNA, 19 bp, synthetic construct
  misc_feature 1..19: note = gRNA NKX2-4_a spacer DNA sequence
  source 1..19: mol_type = other DNA
gcctgtgacgaggagtcgg

SEQ ID NO: 241 - DNA, 19 bp, synthetic construct
  misc_feature 1..19: note = gRNA NKX2-5_a spacer DNA sequence
  source 1..19: mol_type = other DNA
gccagctctggatgtgtcc

SEQ ID NO: 242 - DNA, 19 bp, synthetic construct
  misc_feature 1..19: note = gRNA NOTCH3_a spacer DNA sequence
  source 1..19: mol_type = other DNA
tgggctccgggcgcgtccc

SEQ ID NO: 243 - DNA, 19 bp, synthetic construct
  misc_feature 1..19: note = gRNA NOTO_a spacer DNA sequence
  source 1..19: mol_type = other DNA
caggaggttcccagacaac

SEQ ID NO: 244 - DNA, 19 bp, synthetic construct
  misc_feature 1..19: note = gRNA NOTO_b spacer DNA sequence
  source 1..19: mol_type = other DNA
cctggggctaggcatgacg

SEQ ID NO: 245 - DNA, 19 bp, synthetic construct
  misc_feature 1..19: note = gRNA NR1H2_a spacer DNA sequence
  source 1..19: mol_type = other DNA
gcggggttgccggaagaag

SEQ ID NO: 246 - DNA, 19 bp, synthetic construct
  misc_feature 1..19: note = gRNA NR1H4_a spacer DNA sequence
  source 1..19: mol_type = other DNA
aaatcgctgggatctggag

SEQ ID NO: 247 - DNA, 19 bp, synthetic construct
  misc_feature 1..19: note = gRNA NR1I2_a spacer DNA sequence
  source 1..19: mol_type = other DNA
aatactcctgtcctgaaca

SEQ ID NO: 248 - DNA, 19 bp, synthetic construct
  misc_feature 1..19: note = gRNA NR2C2_a spacer DNA sequence
  source 1..19: mol_type = other DNA
ccgccgcccgcgcgctggt

SEQ ID NO: 249 - DNA, 19 bp, synthetic construct
  misc_feature 1..19: note = gRNA NR2F1_a spacer DNA sequence
  source 1..19: mol_type = other DNA
gaatggagtaaaagagaca

SEQ ID NO: 250 - DNA, 19 bp, synthetic construct
  misc_feature 1..19: note = gRNA NR5A2_b spacer DNA sequence
  source 1..19: mol_type = other DNA
tccggcgaaaagaaggaag

SEQ ID NO: 251 - DNA, 19 bp, synthetic construct
  misc_feature 1..19: note = gRNA OSR2_a spacer DNA sequence
  source 1..19: mol_type = other DNA
gcccaagactcccggcctg

SEQ ID NO: 252 - DNA, 19 bp, synthetic construct
  misc_feature 1..19: note = gRNA OTX1_a spacer DNA sequence
  source 1..19: mol_type = other DNA
cactcccggtgcaacgtgg

SEQ ID NO: 253 - DNA, 19 bp, synthetic construct
  misc_feature 1..19: note = gRNA OVOL1_a spacer DNA sequence
  source 1..19: mol_type = other DNA
aacagggaaggagtcgcta

SEQ ID NO: 254 - DNA, 19 bp, synthetic construct
  misc_feature 1..19: note = gRNA PA2G4_a spacer DNA sequence
  source 1..19: mol_type = other DNA
cccaggctgaagtctatgg

SEQ ID NO: 255 - DNA, 19 bp, synthetic construct
  misc_feature 1..19: note = gRNA PATZ1_a spacer DNA sequence
  source 1..19: mol_type = other DNA
ctgtggagccagaactggg

SEQ ID NO: 256 - DNA, 19 bp, synthetic construct
  misc_feature 1..19: note = gRNA PAX9_a spacer DNA sequence
  source 1..19: mol_type = other DNA
ctgtcagagccgggaaggg

SEQ ID NO: 257 - DNA, 19 bp, synthetic construct
  misc_feature 1..19: note = gRNA PAX9_a spacer DNA sequence
  source 1..19: mol_type = other DNA
gacacgaccggagccctgc

SEQ ID NO: 258 - DNA, 19 bp, synthetic construct
  misc_feature 1..19: note = gRNA PBX4_a spacer DNA sequence
  source 1..19: mol_type = other DNA
tggaggccagactgacgag

SEQ ID NO: 259 - DNA, 19 bp, synthetic construct
  misc_feature 1..19: note = gRNA PGR_a spacer DNA sequence
  source 1..19: mol_type = other DNA
ccacagctgtcactaatcg

SEQ ID NO: 260 - DNA, 19 bp, synthetic construct
  misc_feature 1..19: note = gRNA PITX1_a spacer DNA sequence
  source 1..19: mol_type = other DNA
agactctgccggcgccgtc

SEQ ID NO: 261 - DNA, 19 bp, synthetic construct
  misc_feature 1..19: note = gRNA PITX3_a spacer DNA sequence
  source 1..19: mol_type = other DNA
caggagcgcccgagcggag

SEQ ID NO: 262 - DNA, 19 bp, synthetic construct
  misc_feature 1..19: note = gRNA PITX3_b spacer DNA sequence
  source 1..19: mol_type = other DNA
tcgggcgctcctggactct

SEQ ID NO: 263 - DNA, 19 bp, synthetic construct
  misc_feature 1..19: note = gRNA PITX3_c spacer DNA sequence
  source 1..19: mol_type = other DNA
gctgcggcggcgatctaga

SEQ ID NO: 264 - DNA, 19 bp, synthetic construct
  misc_feature 1..19: note = gRNA POU2F2_a spacer DNA sequence
  source 1..19: mol_type = other DNA
atggttcactccagcatgg

SEQ ID NO: 265 - DNA, 19 bp, synthetic construct
  misc_feature 1..19: note = gRNA POU3F1_a spacer DNA sequence
  source 1..19: mol_type = other DNA
gcccgcagacggagcggag

SEQ ID NO: 266 - DNA, 19 bp, synthetic construct
  misc_feature 1..19: note = gRNA POU3F2_a spacer DNA sequence
  source 1..19: mol_type = other DNA
agtccggctccgagagtca

SEQ ID NO: 267 - DNA, 19 bp, synthetic construct
  misc_feature 1..19: note = gRNA POU3F3_b spacer DNA sequence
  source 1..19: mol_type = other DNA
gctgttccccggcaggtag

SEQ ID NO: 268 - DNA, 19 bp, synthetic construct
  misc_feature 1..19: note = gRNA POU5F1_a spacer DNA sequence
  source 1..19: mol_type = other DNA
aggcaagtgagcttcgacg

SEQ ID NO: 269 - DNA, 19 bp, synthetic construct
  misc_feature 1..19: note = gRNA PRDM1_a spacer DNA sequence
  source 1..19: mol_type = other DNA
gcctctccgcaacactgga

SEQ ID NO: 270 - DNA, 19 bp, synthetic construct
  misc_feature 1..19: note = gRNA PRDM16_b spacer DNA sequence
  source 1..19: mol_type = other DNA
gccgacaccatgcgatcca

SEQ ID NO: 271 - DNA, 19 bp, synthetic construct
  misc_feature 1..19: note = gRNA PRDM7_a spacer DNA sequence
  source 1..19: mol_type = other DNA
gcgaagccagactcccagc

SEQ ID NO: 272 - DNA, 19 bp, synthetic construct
  misc_feature 1..19: note = gRNA PRR12_a spacer DNA sequence
  source 1..19: mol_type = other DNA
tcctcctcctctgcgctca

SEQ ID NO: 273 - DNA, 19 bp, synthetic construct
  misc_feature 1..19: note = gRNA PRRX1_a spacer DNA sequence
  source 1..19: mol_type = other DNA
gcggccgcttggacagccc

SEQ ID NO: 274 - DNA, 19 bp, synthetic construct
  misc_feature 1..19: note = gRNA RBCK1_a spacer DNA sequence
  source 1..19: mol_type = other DNA
aggccccagttcttcgcaa

SEQ ID NO: 275 - DNA, 19 bp, synthetic construct
  misc_feature 1..19: note = gRNA RHOXF1_a spacer DNA sequence
  source 1..19: mol_type = other DNA
gaagaaaagggccaatagg

SEQ ID NO: 276 - DNA, 19 bp, synthetic construct
  misc_feature 1..19: note = gRNA RUNX2_a spacer DNA sequence
  source 1..19: mol_type = other DNA
ctgactctgttggtctcgg

SEQ ID NO: 277 - DNA, 19 bp, synthetic construct
  misc_feature 1..19: note = gRNA SALL3_a spacer DNA sequence
  source 1..19: mol_type = other DNA
ggatgcgcgcgtccgggag

SEQ ID NO: 278 - DNA, 19 bp, synthetic construct
  misc_feature 1..19: note = gRNA SIM1_a spacer DNA sequence
  source 1..19: mol_type = other DNA
gttcactattattcctaat

SEQ ID NO: 279 - DNA, 19 bp, synthetic construct
  misc_feature 1..19: note = gRNA SIX1_a spacer DNA sequence
  source 1..19: mol_type = other DNA
ggcaactagcagcatccac

SEQ ID NO: 280 - DNA, 19 bp, synthetic construct
  misc_feature 1..19: note = gRNA SIX6_a spacer DNA sequence
  source 1..19: mol_type = other DNA
gggagcggacgaccccgac

SEQ ID NO: 281 - DNA, 19 bp, synthetic construct
  misc_feature 1..19: note = gRNA SKI_a spacer DNA sequence
  source 1..19: mol_type = other DNA
tggatgtggcgccgggccc

SEQ ID NO: 282 - DNA, 19 bp, synthetic construct
  misc_feature 1..19: note = gRNA SKIL_a spacer DNA sequence
  source 1..19: mol_type = other DNA
tcgctaggcgggtgttcca

SEQ ID NO: 283 - DNA, 19 bp, synthetic construct
  misc_feature 1..19: note = gRNA SKOR1_a spacer DNA sequence
  source 1..19: mol_type = other DNA
cgccatgcgctccaggctt

SEQ ID NO: 284 - DNA, 19 bp, synthetic construct
  misc_feature 1..19: note = gRNA SMAD2_a spacer DNA sequence
  source 1..19: mol_type = other DNA
ggaccccccggatctgacg

SEQ ID NO: 285 - DNA, 19 bp, synthetic construct
  misc_feature 1..19: note = gRNA SMAD5_a spacer DNA sequence
  source 1..19: mol_type = other DNA
cgcgggcgaggggaactgg

SEQ ID NO: 286 - DNA, 19 bp, synthetic construct
  misc_feature 1..19: note = gRNASMYD3_aspacer DNA sequence
  source 1..19: mol_type = other DNA
tacgcacccgagaaggcag

SEQ ID NO: 287 - DNA, 19 bp, synthetic construct
  misc_feature 1..19: note = gRNASNAPC2_aspacer DNA sequence
  source 1..19: mol_type = other DNA
gcgcctgcctctttctgag

SEQ ID NO: 288 - DNA, 19 bp, synthetic construct
  misc_feature 1..19: note = gRNASOX1_aspacer DNA sequence
  source 1..19: mol_type = other DNA
gagcatagacggccggggt

SEQ ID NO: 289 - DNA, 19 bp, synthetic construct
  misc_feature 1..19: note = gRNASOX14_aspacer DNA sequence
  source 1..19: mol_type = other DNA
cgaggggagcgcagaaccc

SEQ ID NO: 290 - DNA, 19 bp, synthetic construct
  misc_feature 1..19: note = gRNASOX30_aspacer DNA sequence
  source 1..19: mol_type = other DNA
catccgccgtggtgagacc

SEQ ID NO: 291 - DNA, 19 bp, synthetic construct
  misc_feature 1..19: note = gRNASOX5_aspacer DNA sequence
  source 1..19: mol_type = other DNA
ggtcgcttggaagacatcc

SEQ ID NO: 292 - DNA, 19 bp, synthetic construct
  misc_feature 1..19: note = gRNASOX6_aspacer DNA sequence
  source 1..19: mol_type = other DNA
aatggagaggtggcttgct

SEQ ID NO: 293 - DNA, 19 bp, synthetic construct
  misc_feature 1..19: note = gRNASP2_aspacer DNA sequence
  source 1..19: mol_type = other DNA
aggaagatgtcgtaatgag

SEQ ID NO: 294 - DNA, 19 bp, synthetic construct
  misc_feature 1..19: note = gRNASP3_aspacer DNA sequence
  source 1..19: mol_type = other DNA
tagcggccagcagagcgag

SEQ ID NO: 295 - DNA, 19 bp, synthetic construct
  misc_feature 1..19: note = gRNASP5_aspacer DNA sequence
  source 1..19: mol_type = other DNA
gcgcggcgaggggcaaggg

SEQ ID NO: 296 - DNA, 19 bp, synthetic construct
  misc_feature 1..19: note = gRNASP8_aspacer DNA sequence
  source 1..19: mol_type = other DNA
aaaaagatcctctgagagg

SEQ ID NO: 297 - DNA, 19 bp, synthetic construct
  misc_feature 1..19: note = gRNASP9_aspacer DNA sequence
  source 1..19: mol_type = other DNA
ctatggccacgtctatact

SEQ ID NO: 298 - DNA, 19 bp, synthetic construct
  misc_feature 1..19: note = gRNASPIB_1spacer DNA sequence
  source 1..19: mol_type = other DNA
gaggctgcacagtaagtga

SEQ ID NO: 299 - DNA, 19 bp, synthetic construct
  misc_feature 1..19: note = gRNASTAT5B_aspacer DNA sequence
  source 1..19: mol_type = other DNA
gcggcgcggccctgacggg

SEQ ID NO: 300 - DNA, 19 bp, synthetic construct
  misc_feature 1..19: note = gRNAT_aspacer DNA sequence
  source 1..19: mol_type = other DNA
ccggcgtcgggtgtccccg

SEQ ID NO: 301 - DNA, 19 bp, synthetic construct
  misc_feature 1..19: note = gRNATBPL1_aspacer DNA sequence
  source 1..19: mol_type = other DNA
tattgtcgcggggaagctg

SEQ ID NO: 302 - DNA, 19 bp, synthetic construct
  misc_feature 1..19: note = gRNATBX5_aspacer DNA sequence
  source 1..19: mol_type = other DNA
gtacctcccagctcaaggt

SEQ ID NO: 303 - DNA, 19 bp, synthetic construct
  misc_feature 1..19: note = gRNATBX6_aspacer DNA sequence
  source 1..19: mol_type = other DNA
tcgcgccagggtttcccga

SEQ ID NO: 304 - DNA, 19 bp, synthetic construct
  misc_feature 1..19: note = gRNATCF12_aspacer DNA sequence
  source 1..19: mol_type = other DNA
ccccccgaatagaacttgt

SEQ ID NO: 305 - DNA, 19 bp, synthetic construct
  misc_feature 1..19: note = gRNATCF23_aspacer DNA sequence
  source 1..19: mol_type = other DNA
aggacaaggcaggacccgt

SEQ ID NO: 306 - DNA, 19 bp, synthetic construct
  misc_feature 1..19: note = gRNATCF3_aspacer DNA sequence
  source 1..19: mol_type = other DNA
tagcgggccggagccgacg

SEQ ID NO: 307 - DNA, 19 bp, synthetic construct
  misc_feature 1..19: note = gRNATFAP2A_aspacer DNA sequence
  source 1..19: mol_type = other DNA
ccgccgctaagaaaagagg

SEQ ID NO: 308 - DNA, 19 bp, synthetic construct
  misc_feature 1..19: note = gRNATFAP2A_bspacer DNA sequence
  source 1..19: mol_type = other DNA
ccagagagtagctccactt

SEQ ID NO: 309 - DNA, 19 bp, synthetic construct
  misc_feature 1..19: note = gRNATFAP2E_aspacer DNA sequence
  source 1..19: mol_type = other DNA
ccatggaggcaggacggac

SEQ ID NO: 310 - DNA, 19 bp, synthetic construct
  misc_feature 1..19: note = gRNATFDP2_aspacer DNA sequence
  source 1..19: mol_type = other DNA
agtctttgttaccattcag

SEQ ID NO: 311 - DNA, 19 bp, synthetic construct
  misc_feature 1..19: note = gRNATFDP3_aspacer DNA sequence
  source 1..19: mol_type = other DNA
ggtgtgaacggccacgggg

SEQ ID NO: 312 - DNA, 19 bp, synthetic construct
  misc_feature 1..19: note = gRNATGIF2_aspacer DNA sequence
  source 1..19: mol_type = other DNA
tccctgtcggagagatcgg

SEQ ID NO: 313 - DNA, 19 bp, synthetic construct
  misc_feature 1..19: note = gRNATGIF2LX_aspacer DNA sequence
  source 1..19: mol_type = other DNA
atatggaggccgctgcgga

SEQ ID NO: 314 - DNA, 19 bp, synthetic construct
  misc_feature 1..19: note = gRNATHAP6_aspacer DNA sequence
  source 1..19: mol_type = other DNA
caggctccccgccaccgga

SEQ ID NO: 315 - DNA, 19 bp, synthetic construct
  misc_feature 1..19: note = gRNATHRA_aspacer DNA sequence
  source 1..19: mol_type = other DNA
tgctgggggcgtccatggg

SEQ ID NO: 316 - DNA, 19 bp, synthetic construct
  misc_feature 1..19: note = gRNATIGD1_aspacer DNA sequence
  source 1..19: mol_type = other DNA
cgggcgggtcacaaggacc

SEQ ID NO: 317 - DNA, 19 bp, synthetic construct
  misc_feature 1..19: note = gRNATIGD3_aspacer DNA sequence
  source 1..19: mol_type = other DNA
ggcggcgacagcagaacag

SEQ ID NO: 318 - DNA, 19 bp, synthetic construct
  misc_feature 1..19: note = gRNATIGD5_aspacer DNA sequence
  source 1..19: mol_type = other DNA
ccatcgagcgcgtcaaggg

SEQ ID NO: 319 - DNA, 19 bp, synthetic construct
  misc_feature 1..19: note = gRNATLX3_aspacer DNA sequence
  source 1..19: mol_type = other DNA
ccgacggcgccagctacct

SEQ ID NO: 320 - DNA, 19 bp, synthetic construct
  misc_feature 1..19: note = gRNATOX_aspacer DNA sequence
  source 1..19: mol_type = other DNA
cggaacagagtgaggtgtc

SEQ ID NO: 321 - DNA, 19 bp, synthetic construct
  misc_feature 1..19: note = gRNATOX2_aspacer DNA sequence
  source 1..19: mol_type = other DNA
cgcgggcgccgaggggtac

SEQ ID NO: 322 - DNA, 19 bp, synthetic construct
  misc_feature 1..19: note = gRNATRIM27_aspacer DNA sequence
  source 1..19: mol_type = other DNA
gctctcgcttagggggcac

SEQ ID NO: 323 - DNA, 19 bp, synthetic construct
  misc_feature 1..19: note = gRNATRIM27_aspacer DNA sequence
  source 1..19: mol_type = other DNA
aggctcgcggccacgctag

SEQ ID NO: 324 - DNA, 19 bp, synthetic construct
  misc_feature 1..19: note = gRNATRIM40_aspacer DNA sequence
  source 1..19: mol_type = other DNA
aatttcagatcatcttctc

SEQ ID NO: 325 - DNA, 19 bp, synthetic construct
  misc_feature 1..19: note = gRNATRIM52_aspacer DNA sequence
  source 1..19: mol_type = other DNA
tagccagcggctgcatctg

SEQ ID NO: 326 - DNA, 19 bp, synthetic construct
  misc_feature 1..19: note = gRNATSHZ2_aspacer DNA sequence
  source 1..19: mol_type = other DNA
acacacacaagacagggcg

SEQ ID NO: 327 - DNA, 19 bp, synthetic construct
  misc_feature 1..19: note = gRNAVAX1_aspacer DNA sequence
  source 1..19: mol_type = other DNA
tgtccccagcctggcgatc

SEQ ID NO: 328 - DNA, 19 bp, synthetic construct
  misc_feature 1..19: note = gRNAVEGFA_aspacer DNA sequence
  source 1..19: mol_type = other DNA
ccgggtagctcggaggtcg

SEQ ID NO: 329 - DNA, 19 bp, synthetic construct
  misc_feature 1..19: note = gRNAVSX1_aspacer DNA sequence
  source 1..19: mol_type = other DNA
atagcatgggatcatgctc

SEQ ID NO: 330 - DNA, 19 bp, synthetic construct
  misc_feature 1..19: note = gRNAVSX1_bspacer DNA sequence
  source 1..19: mol_type = other DNA
cagcgtgatggccgagtac

SEQ ID NO: 331 - DNA, 19 bp, synthetic construct
  misc_feature 1..19: note = gRNAWNT1_aspacer DNA sequence
  source 1..19: mol_type = other DNA
gctcgcggtcccggctggt

SEQ ID NO: 332 - DNA, 19 bp, synthetic construct
  misc_feature 1..19: note = gRNAWNT3A_aspacer DNA sequence
  source 1..19: mol_type = other DNA
gctcactcaccaccagatc

SEQ ID NO: 333 - DNA, 19 bp, synthetic construct
  misc_feature 1..19: note = gRNAYBX1_aspacer DNA sequence
  source 1..19: mol_type = other DNA
tcgaactagcgagaatggc

SEQ ID NO: 334 - DNA, 19 bp, synthetic construct
  misc_feature 1..19: note = gRNAYY1_aspacer DNA sequence
  source 1..19: mol_type = other DNA
gcggctgcagagcgatcat

SEQ ID NO: 335 - DNA, 19 bp, synthetic construct
  misc_feature 1..19: note = gRNAYY2_aspacer DNA sequence
  source 1..19: mol_type = other DNA
agagaaaggcgcgagactg

SEQ ID NO: 336 - DNA, 19 bp, synthetic construct
  misc_feature 1..19: note = gRNAYY2_bspacer DNA sequence
  source 1..19: mol_type = other DNA
aggaaggggcgagctgcag

SEQ ID NO: 337 - DNA, 19 bp, synthetic construct
  misc_feature 1..19: note = gRNAZBED5_aspacer DNA sequence
  source 1..19: mol_type = other DNA
cagctcagggatatcgcct

SEQ ID NO: 338 - DNA, 19 bp, synthetic construct
  misc_feature 1..19: note = gRNAZBED5_bspacer DNA sequence
  source 1..19: mol_type = other DNA
atctctatggagatggcct

SEQ ID NO: 339 - DNA, 19 bp, synthetic construct
  misc_feature 1..19: note = gRNAZBTB2_aspacer DNA sequence
  source 1..19: mol_type = other DNA
gtgtggaggaggcgcctct

SEQ ID NO: 340 - DNA, 19 bp, synthetic construct
  misc_feature 1..19: note = gRNAZBTB21_aspacer DNA sequence
  source 1..19: mol_type = other DNA
gatggaatcacagcggcag

SEQ ID NO: 341 - DNA, 19 bp, synthetic construct
  misc_feature 1..19: note = gRNAZBTB38_aspacer DNA sequence
  source 1..19: mol_type = other DNA
cacgggtccggaagcacca

SEQ ID NO: 342 - DNA, 19 bp, synthetic construct
  misc_feature 1..19: note = gRNAZBTB4_aspacer DNA sequence
  source 1..19: mol_type = other DNA
cgcctgcgcaggcccgcaa

SEQ ID NO: 343 - DNA, 19 bp, synthetic construct
  misc_feature 1..19: note = gRNAZBTB40_aspacer DNA sequence
  source 1..19: mol_type = other DNA
cgccggagacgccagaagg

SEQ ID NO: 344 - DNA, 19 bp, synthetic construct
  misc_feature 1..19: note = gRNAZBTB42_aspacer DNA sequence
  source 1..19: mol_type = other DNA
gccgggaagggcgcttcgt

SEQ ID NO: 345 - DNA, 19 bp, synthetic construct
  misc_feature 1..19: note = gRNAZBTB49_aspacer DNA sequence
  source 1..19: mol_type = other DNA
tctgtgccgggcatcacag

SEQ ID NO: 346 - DNA, 19 bp, synthetic construct
  misc_feature 1..19: note = gRNAZBTB7B_aspacer DNA sequence
  source 1..19: mol_type = other DNA
gcggccttctgaccaggac

SEQ ID NO: 347 - DNA, 19 bp, synthetic construct
  misc_feature 1..19: note = gRNAZBTB7B_bspacer DNA sequence
  source 1..19: mol_type = other DNA
agcagggccccaagccccc

SEQ ID NO: 348 - DNA, 19 bp, synthetic construct
  misc_feature 1..19: note = gRNAZBTB7C_cspacer DNA sequence
  source 1..19: mol_type = other DNA
cgccacgagactctgacag

SEQ ID NO: 349 - DNA, 19 bp, synthetic construct
  misc_feature 1..19: note = gRNAZBTB8B_aspacer DNA sequence
  source 1..19: mol_type = other DNA
gtcggtgcgcggtgctccg

SEQ ID NO: 350 - DNA, 19 bp, synthetic construct
  misc_feature 1..19: note = gRNAZBTB9_aspacer DNA sequence
  source 1..19: mol_type = other DNA
gtcggcgggaaggacaatc

SEQ ID NO: 351 - DNA, 19 bp, synthetic construct
  misc_feature 1..19: note = gRNAZC3H8_aspacer DNA sequence
  source 1..19: mol_type = other DNA
acccgagagagtgacaacc

SEQ ID NO: 352 - DNA, 19 bp, synthetic construct
  misc_feature 1..19: note = gRNAZEB2_aspacer DNA sequence
  source 1..19: mol_type = other DNA
cctcgccaagagtgtcggg

SEQ ID NO: 353 - DNA, 19 bp, synthetic construct
  misc_feature 1..19: note = gRNAZFHX2_aspacer DNA sequence
  source 1..19: mol_type = other DNA
ctctacctaaagctgaact

SEQ ID NO: 354 - DNA, 19 bp, synthetic construct
  misc_feature 1..19: note = gRNAZFHX3_aspacer DNA sequence
  source 1..19: mol_type = other DNA
tgccgccgagcagcatggt

SEQ ID NO: 355 - DNA, 19 bp, synthetic construct
  misc_feature 1..19: note = gRNAZFP28_aspacer DNA sequence
  source 1..19: mol_type = other DNA
gcctcgggtgacatgcggg

SEQ ID NO: 356 - DNA, 19 bp, synthetic construct
  misc_feature 1..19: note = gRNAZFP41_aspacer DNA sequence
  source 1..19: mol_type = other DNA
ccggtgcctagggccgacg

SEQ ID NO: 357 - DNA, 19 bp, synthetic construct
  misc_feature 1..19: note = gRNAZFP69B_aspacer DNA sequence
  source 1..19: mol_type = other DNA
ctgcagcggtgggaaggcg

SEQ ID NO: 358 - DNA, 19 bp, synthetic construct
  misc_feature 1..19: note = gRNAZFP90_aspacer DNA sequence
  source 1..19: mol_type = other DNA
gcaaggcgcgaaacccacc

SEQ ID NO: 359 - DNA, 19 bp, synthetic construct
  misc_feature 1..19: note = gRNAZGLP1_aspacer DNA sequence
  source 1..19: mol_type = other DNA
taaaggccccacctagctc

SEQ ID NO: 360 - DNA, 19 bp, synthetic construct
  misc_feature 1..19: note = gRNAZHX3_aspacer DNA sequence
  source 1..19: mol_type = other DNA
ggagccgcggactgctgag

SEQ ID NO: 361 - DNA, 19 bp, synthetic construct
  misc_feature 1..19: note = gRNAZIC5_aspacer DNA sequence
  source 1..19: mol_type = other DNA
gctacaccaccaccaacag

SEQ ID NO: 362 - DNA, 19 bp, synthetic construct
  misc_feature 1..19: note = gRNA ZKSCAN1_a spacer DNA sequence
  source 1..19: mol_type = other DNA
gagggcctaagtccgtgtg

SEQ ID NO: 363 - DNA, 19 bp, synthetic construct
  misc_feature 1..19: note = gRNA ZKSCAN1_b spacer DNA sequence
  source 1..19: mol_type = other DNA
ggccgaagggcaccgcaca

SEQ ID NO: 364 - DNA, 19 bp, synthetic construct
  misc_feature 1..19: note = gRNA ZKSCAN2_a spacer DNA sequence
  source 1..19: mol_type = other DNA
cagggctcgcagggggcag

SEQ ID NO: 365 - DNA, 19 bp, synthetic construct
  misc_feature 1..19: note = gRNA ZKSCAN7_a spacer DNA sequence
  source 1..19: mol_type = other DNA
ccgcgtctcggcccactcg

SEQ ID NO: 366 - DNA, 19 bp, synthetic construct
  misc_feature 1..19: note = gRNA ZNF107_a spacer DNA sequence
  source 1..19: mol_type = other DNA
agccacagccacttccgat

SEQ ID NO: 367 - DNA, 19 bp, synthetic construct
  misc_feature 1..19: note = gRNA ZNF121_a spacer DNA sequence
  source 1..19: mol_type = other DNA
tcccagtcaggagccaggt

SEQ ID NO: 368 - DNA, 19 bp, synthetic construct
  misc_feature 1..19: note = gRNA ZNF132_a spacer DNA sequence
  source 1..19: mol_type = other DNA
agcaaaatgaggaccgcaa

SEQ ID NO: 369 - DNA, 19 bp, synthetic construct
  misc_feature 1..19: note = gRNA ZNF135_a spacer DNA sequence
  source 1..19: mol_type = other DNA
ctttgtctcgcagtcagga

SEQ ID NO: 370 - DNA, 19 bp, synthetic construct
  misc_feature 1..19: note = gRNA ZNF135_b spacer DNA sequence
  source 1..19: mol_type = other DNA
agggtgagctaggccggcg

SEQ ID NO: 371 - DNA, 19 bp, synthetic construct
  misc_feature 1..19: note = gRNA ZNF140_a spacer DNA sequence
  source 1..19: mol_type = other DNA
cgttgcctacagccaacac

SEQ ID NO: 372 - DNA, 19 bp, synthetic construct
  misc_feature 1..19: note = gRNA ZNF141_a spacer DNA sequence
  source 1..19: mol_type = other DNA
agctgtggccgaatcacca

SEQ ID NO: 373 - DNA, 19 bp, synthetic construct
  misc_feature 1..19: note = gRNA ZNF222_a spacer DNA sequence
  source 1..19: mol_type = other DNA
ggttgcgagccccaaggaa

SEQ ID NO: 374 - DNA, 19 bp, synthetic construct
  misc_feature 1..19: note = gRNA ZNF225_a spacer DNA sequence
  source 1..19: mol_type = other DNA
caacctcacagtaacggag

SEQ ID NO: 375 - DNA, 19 bp, synthetic construct
  misc_feature 1..19: note = gRNA ZNF229_a spacer DNA sequence
  source 1..19: mol_type = other DNA
aggccatgggaattaggat

SEQ ID NO: 376 - DNA, 19 bp, synthetic construct
  misc_feature 1..19: note = gRNA ZNF230_a spacer DNA sequence
  source 1..19: mol_type = other DNA
tcgttgcgaccccaagcga

SEQ ID NO: 377 - DNA, 19 bp, synthetic construct
  misc_feature 1..19: note = gRNA ZNF248_a spacer DNA sequence
  source 1..19: mol_type = other DNA
tgcaggagccgtctccctc

SEQ ID NO: 378 - DNA, 19 bp, synthetic construct
  misc_feature 1..19: note = gRNA ZNF25_a spacer DNA sequence
  source 1..19: mol_type = other DNA
accaggcggctcccaccca

SEQ ID NO: 379 - DNA, 19 bp, synthetic construct
  misc_feature 1..19: note = gRNA ZNF26_a spacer DNA sequence
  source 1..19: mol_type = other DNA
acacccgctggccagattc

SEQ ID NO: 380 - DNA, 19 bp, synthetic construct
  misc_feature 1..19: note = gRNA ZNF267_a spacer DNA sequence
  source 1..19: mol_type = other DNA
tacatcacctcaaataaaa

SEQ ID NO: 381 - DNA, 19 bp, synthetic construct
  misc_feature 1..19: note = gRNA ZNF280C_a spacer DNA sequence
  source 1..19: mol_type = other DNA
tggggttcggataaggagg

SEQ ID NO: 382 - DNA, 19 bp, synthetic construct
  misc_feature 1..19: note = gRNA ZNF281_a spacer DNA sequence
  source 1..19: mol_type = other DNA
gacccgtaagtattgccgg

SEQ ID NO: 383 - DNA, 19 bp, synthetic construct
  misc_feature 1..19: note = gRNA ZNF283_a spacer DNA sequence
  source 1..19: mol_type = other DNA
accttaaggacaccggaaa

SEQ ID NO: 384 - DNA, 19 bp, synthetic construct
  misc_feature 1..19: note = gRNA ZNF286B_a spacer DNA sequence
  source 1..19: mol_type = other DNA
gtgctgctctcattccgcc

SEQ ID NO: 385 - DNA, 19 bp, synthetic construct
  misc_feature 1..19: note = gRNA ZNF304_a spacer DNA sequence
  source 1..19: mol_type = other DNA
caaccagaatgcacggacc

SEQ ID NO: 386 - DNA, 19 bp, synthetic construct
  misc_feature 1..19: note = gRNA ZNF317_a spacer DNA sequence
  source 1..19: mol_type = other DNA
atcgggggagcggaggtga

SEQ ID NO: 387 - DNA, 19 bp, synthetic construct
  misc_feature 1..19: note = gRNA ZNF317_b spacer DNA sequence
  source 1..19: mol_type = other DNA
gacacgaggggtccccaac

SEQ ID NO: 388 - DNA, 19 bp, synthetic construct
  misc_feature 1..19: note = gRNA ZNF318_a spacer DNA sequence
  source 1..19: mol_type = other DNA
cacggcgacagctctgacc

SEQ ID NO: 389 - DNA, 19 bp, synthetic construct
  misc_feature 1..19: note = gRNA ZNF320_a spacer DNA sequence
  source 1..19: mol_type = other DNA
agccgccgagagcgacggt

SEQ ID NO: 390 - DNA, 19 bp, synthetic construct
  misc_feature 1..19: note = gRNA ZNF33B_a spacer DNA sequence
  source 1..19: mol_type = other DNA
aggaactggcgtagcgtcc

SEQ ID NO: 391 - DNA, 19 bp, synthetic construct
  misc_feature 1..19: note = gRNA ZNF346_a spacer DNA sequence
  source 1..19: mol_type = other DNA
caggccgcggacggcggag

SEQ ID NO: 392 - DNA, 19 bp, synthetic construct
  misc_feature 1..19: note = gRNA ZNF358_a spacer DNA sequence
  source 1..19: mol_type = other DNA
cgctcccggggagcgagag

SEQ ID NO: 393 - DNA, 19 bp, synthetic construct
  misc_feature 1..19: note = gRNA ZNF367_a spacer DNA sequence
  source 1..19: mol_type = other DNA
tgtaacgcgggaaaagccg

SEQ ID NO: 394 - DNA, 19 bp, synthetic construct
  misc_feature 1..19: note = gRNA ZNF382_a spacer DNA sequence
  source 1..19: mol_type = other DNA
cacggacgcagccacagaa

SEQ ID NO: 395 - DNA, 19 bp, synthetic construct
  misc_feature 1..19: note = gRNA ZNF383_a spacer DNA sequence
  source 1..19: mol_type = other DNA
caagggtaggggaagtgcg

SEQ ID NO: 396 - DNA, 19 bp, synthetic construct
  misc_feature 1..19: note = gRNA ZNF385B_a spacer DNA sequence
  source 1..19: mol_type = other DNA
cggcgcgcgagagtggcgt

SEQ ID NO: 397 - DNA, 19 bp, synthetic construct
  misc_feature 1..19: note = gRNA ZNF385B_b spacer DNA sequence
  source 1..19: mol_type = other DNA
gcccggcgcgggcaagagt

SEQ ID NO: 398 - DNA, 19 bp, synthetic construct
  misc_feature 1..19: note = gRNA ZNF391_a spacer DNA sequence
  source 1..19: mol_type = other DNA
cccgcccggggtgtgtcgg

SEQ ID NO: 399 - DNA, 19 bp, synthetic construct
  misc_feature 1..19: note = gRNA ZNF415_a spacer DNA sequence
  source 1..19: mol_type = other DNA
aacggatcgcgttgggtga

SEQ ID NO: 400 - DNA, 19 bp, synthetic construct
  misc_feature 1..19: note = gRNA ZNF423_a spacer DNA sequence
  source 1..19: mol_type = other DNA
ccttgcctggggaggatga

SEQ ID NO: 401 - DNA, 19 bp, synthetic construct
  misc_feature 1..19: note = gRNA ZNF43_a spacer DNA sequence
  source 1..19: mol_type = other DNA
ctccggcacgcgcagattg

SEQ ID NO: 402 - DNA, 19 bp, synthetic construct
  misc_feature 1..19: note = gRNA ZNF43_b spacer DNA sequence
  source 1..19: mol_type = other DNA
cagctctgcagccgcaacg

SEQ ID NO: 403 - DNA, 19 bp, synthetic construct
  misc_feature 1..19: note = gRNA ZNF432_a spacer DNA sequence
  source 1..19: mol_type = other DNA
cagggcgtggaaacgtggt

SEQ ID NO: 404 - DNA, 19 bp, synthetic construct
  misc_feature 1..19: note = gRNA ZNF433_a spacer DNA sequence
  source 1..19: mol_type = other DNA
caggcggcgagctgaggtt

SEQ ID NO: 405 - DNA, 19 bp, synthetic construct
  misc_feature 1..19: note = gRNA ZNF436_a spacer DNA sequence
  source 1..19: mol_type = other DNA
tcagaaaccacaggctcat

SEQ ID NO: 406 - DNA, 19 bp, synthetic construct
  misc_feature 1..19: note = gRNA ZNF441_a spacer DNA sequence
  source 1..19: mol_type = other DNA
aatcaggcgcactgaccgg

SEQ ID NO: 407 - DNA, 19 bp, synthetic construct
  misc_feature 1..19: note = gRNA ZNF441_b spacer DNA sequence
  source 1..19: mol_type = other DNA
cgtgcggccgagggaaccg

SEQ ID NO: 408 - DNA, 19 bp, synthetic construct
  misc_feature 1..19: note = gRNA ZNF443_a spacer DNA sequence
  source 1..19: mol_type = other DNA
ggagctgtcggtaggacct

SEQ ID NO: 409 - DNA, 19 bp, synthetic construct
  misc_feature 1..19: note = gRNA ZNF461_a spacer DNA sequence
  source 1..19: mol_type = other DNA
aggaatggtctccgggtag

SEQ ID NO: 410 - DNA, 19 bp, synthetic construct
  misc_feature 1..19: note = gRNA ZNF462_a spacer DNA sequence
  source 1..19: mol_type = other DNA
tgccgggtctcagcaatgg

SEQ ID NO: 411 - DNA, 19 bp, synthetic construct
  misc_feature 1..19: note = gRNA ZNF468_a spacer DNA sequence
  source 1..19: mol_type = other DNA
aaacgtatacattgcccta

SEQ ID NO: 412 - DNA, 19 bp, synthetic construct
  misc_feature 1..19: note = gRNA ZNF473_a spacer DNA sequence
  source 1..19: mol_type = other DNA
ctgcgaggaggcgcgtgtg

SEQ ID NO: 413 - DNA, 19 bp, synthetic construct
  misc_feature 1..19: note = gRNA ZNF483_a spacer DNA sequence
  source 1..19: mol_type = other DNA
cggatgctgatgcaggtac

SEQ ID NO: 414 - DNA, 19 bp, synthetic construct
  misc_feature 1..19: note = gRNA ZNF486_a spacer DNA sequence
  source 1..19: mol_type = other DNA
tcgctgcatctggagctct

SEQ ID NO: 415 - DNA, 19 bp, synthetic construct
  misc_feature 1..19: note = gRNA ZNF491_a spacer DNA sequence
  source 1..19: mol_type = other DNA
gactggatgcagaacgcaa

SEQ ID NO: 416 - DNA, 19 bp, synthetic construct
  misc_feature 1..19: note = gRNA ZNF507_a spacer DNA sequence
  source 1..19: mol_type = other DNA
tggagctccggatgaggag

SEQ ID NO: 417 - DNA, 19 bp, synthetic construct
  misc_feature 1..19: note = gRNA ZNF514_a spacer DNA sequence
  source 1..19: mol_type = other DNA
agaggcaggcagtacttca

SEQ ID NO: 418 - DNA, 19 bp, synthetic construct
  misc_feature 1..19: note = gRNA ZNF519_a spacer DNA sequence
  source 1..19: mol_type = other DNA
cacagagcgacggagtgag

SEQ ID NO: 419 - DNA, 19 bp, synthetic construct
  misc_feature 1..19: note = gRNA ZNF519_b spacer DNA sequence
  source 1..19: mol_type = other DNA
cagccagagcgcggggtta

SEQ ID NO: 420 - DNA, 19 bp, synthetic construct
  misc_feature 1..19: note = gRNA ZNF540_a spacer DNA sequence
  source 1..19: mol_type = other DNA
acgggccctagcggcttgg

SEQ ID NO: 421 - DNA, 19 bp, synthetic construct
  misc_feature 1..19: note = gRNA ZNF543_a spacer DNA sequence
  source 1..19: mol_type = other DNA
gctggacgcgcctacccag

SEQ ID NO: 422 - DNA, 19 bp, synthetic construct
  misc_feature 1..19: note = gRNA ZNF546_a spacer DNA sequence
  source 1..19: mol_type = other DNA
gcaatgtaaagggcccttg

SEQ ID NO: 423 - DNA, 19 bp, synthetic construct
  misc_feature 1..19: note = gRNA ZNF549_a spacer DNA sequence
  source 1..19: mol_type = other DNA
gccggaaacgcccagcccg

SEQ ID NO: 424 - DNA, 19 bp, synthetic construct
  misc_feature 1..19: note = gRNA ZNF555_a spacer DNA sequence
  source 1..19: mol_type = other DNA
gccagggaccgctaggggc

SEQ ID NO: 425 - DNA, 19 bp, synthetic construct
  misc_feature 1..19: note = gRNA ZNF562_a spacer DNA sequence
  source 1..19: mol_type = other DNA
caccacaataaaggttaaa

SEQ ID NO: 426 - DNA, 19 bp, synthetic construct
  misc_feature 1..19: note = gRNA ZNF567_a spacer DNA sequence
  source 1..19: mol_type = other DNA
cggccggcaaccgaaggtg

SEQ ID NO: 427 - DNA, 19 bp, synthetic construct
  misc_feature 1..19: note = gRNA ZNF569_a spacer DNA sequence
  source 1..19: mol_type = other DNA
gtctcggtccgttacacca

SEQ ID NO: 428 - DNA, 19 bp, synthetic construct
  misc_feature 1..19: note = gRNA ZNF574_a spacer DNA sequence
  source 1..19: mol_type = other DNA
actgaggtagtgactgagg

SEQ ID NO: 429 - DNA, 19 bp, synthetic construct
  misc_feature 1..19: note = gRNA ZNF577_a spacer DNA sequence
  source 1..19: mol_type = other DNA
gcagtgtgtggggttcgcg

SEQ ID NO: 430 - DNA, 19 bp, synthetic construct
  misc_feature 1..19: note = gRNA ZNF596_a spacer DNA sequence
  source 1..19: mol_type = other DNA
ccgcaggaagggaactgcg

SEQ ID NO: 431 - DNA, 19 bp, synthetic construct
  misc_feature 1..19: note = gRNA ZNF610_a spacer DNA sequence
  source 1..19: mol_type = other DNA
aagcgcggggcaggacgtt

SEQ ID NO: 432 - DNA, 19 bp, synthetic construct
  misc_feature 1..19: note = gRNA ZNF616_a spacer DNA sequence
  source 1..19: mol_type = other DNA
cccctccaggcgtcgacaa

SEQ ID NO: 433 - DNA, 19 bp, synthetic construct
  misc_feature 1..19: note = gRNA ZNF621_a spacer DNA sequence
  source 1..19: mol_type = other DNA
cacggtccgggtgaaggag

SEQ ID NO: 434 - DNA, 19 bp, synthetic construct
  misc_feature 1..19: note = gRNA ZNF626_a spacer DNA sequence
  source 1..19: mol_type = other DNA
tgggagagacgccacgctg

SEQ ID NO: 435 - DNA, 19 bp, synthetic construct
  misc_feature 1..19: note = gRNA ZNF627_a spacer DNA sequence
  source 1..19: mol_type = other DNA
acgcgagcccgggtgggga

SEQ ID NO: 436 - DNA, 19 bp, synthetic construct
  misc_feature 1..19: note = gRNA ZNF629_a spacer DNA sequence
  source 1..19: mol_type = other DNA
cttctcaaggggtgattcc

SEQ ID NO: 437 - DNA, 19 bp, synthetic construct
  misc_feature 1..19: note = gRNA ZNF630_a spacer DNA sequence
  source 1..19: mol_type = other DNA
cactcacccggacaagtcg

SEQ ID NO: 438 - DNA, 19 bp, synthetic construct
  misc_feature 1..19: note = gRNA ZNF630_a spacer DNA sequence
  source 1..19: mol_type = other DNA
atcctacgaaagcagtgtg

SEQ ID NO: 439 - DNA, 19 bp, synthetic construct
  misc_feature 1..19: note = gRNA ZNF641_a spacer DNA sequence
  source 1..19: mol_type = other DNA
cggcggagccagcgacagg

SEQ ID NO: 440 - DNA, 19 bp, synthetic construct
  misc_feature 1..19: note = gRNA ZNF645_a spacer DNA sequence
  source 1..19: mol_type = other DNA
cacattcttgttcaccagc

SEQ ID NO: 441 - DNA, 19 bp, synthetic construct
  misc_feature 1..19: note = gRNA ZNF658_a spacer DNA sequence
  source 1..19: mol_type = other DNA
accaaagaggtcgttgtga

SEQ ID NO: 442 - DNA, 19 bp, synthetic construct
  misc_feature 1..19: note = gRNA ZNF660_a spacer DNA sequence
  source 1..19: mol_type = other DNA
gctacgaggagtcagagac

SEQ ID NO: 443 - DNA, 19 bp, synthetic construct
  misc_feature 1..19: note = gRNA ZNF662_a spacer DNA sequence
  source 1..19: mol_type = other DNA
tggagtcggggtcttactc

SEQ ID NO: 444 - DNA, 19 bp, synthetic construct
  misc_feature 1..19: note = gRNA ZNF677_a spacer DNA sequence
  source 1..19: mol_type = other DNA
gcgagatccgcttccgggt

SEQ ID NO: 445 - DNA, 19 bp, synthetic construct
  misc_feature 1..19: note = gRNA ZNF682_a spacer DNA sequence
  source 1..19: mol_type = other DNA
gactccagtccgcagactc

SEQ ID NO: 446 - DNA, 19 bp, synthetic construct
  misc_feature 1..19: note = gRNA ZNF697_a spacer DNA sequence
  source 1..19: mol_type = other DNA
gccccaggggagcggacaa

SEQ ID NO: 447 - DNA, 19 bp, synthetic construct
  misc_feature 1..19: note = gRNA ZNF703_a spacer DNA sequence
  source 1..19: mol_type = other DNA
tgctagccggggccagcgg

SEQ ID NO: 448 - DNA, 19 bp, synthetic construct
  misc_feature 1..19: note = gRNA ZNF705A_a spacer DNA sequence
  source 1..19: mol_type = other DNA
tgagtatattcaggaggat

SEQ ID NO: 449 - DNA, 19 bp, synthetic construct
  misc_feature 1..19: note = gRNA ZNF705B_a spacer DNA sequence
  source 1..19: mol_type = other DNA
tagccccagttggccctac

SEQ ID NO: 450 - DNA, 19 bp, synthetic construct
  misc_feature 1..19: note = gRNA ZNF705G_a spacer DNA sequence
  source 1..19: mol_type = other DNA
ttggaacacccaggcaggg

SEQ ID NO: 451 - DNA, 19 bp, synthetic construct
  misc_feature 1..19: note = gRNA ZNF716_a spacer DNA sequence
  source 1..19: mol_type = other DNA
ggacgcttccgtaaggtta

SEQ ID NO: 452 - DNA, 19 bp, synthetic construct
  misc_feature 1..19: note = gRNA ZNF729_a spacer DNA sequence
  source 1..19: mol_type = other DNA
cgagatgggaaagaactcc

SEQ ID NO: 453 - DNA, 19 bp, synthetic construct
  misc_feature 1..19: note = gRNA ZNF750_a spacer DNA sequence
  source 1..19: mol_type = other DNA
tgggctccgaggattactc

SEQ ID NO: 454 - DNA, 19 bp, synthetic construct
  misc_feature 1..19: note = gRNA ZNF75A_a spacer DNA sequence
  source 1..19: mol_type = other DNA
ctggctctgtacctggaca

SEQ ID NO: 455 - DNA, 19 bp, synthetic construct
  misc_feature 1..19: note = gRNA ZNF765_a spacer DNA sequence
  source 1..19: mol_type = other DNA
actgggaggcgctcaggga

SEQ ID NO: 456 - DNA, 19 bp, synthetic construct
  misc_feature 1..19: note = gRNA ZNF771_a spacer DNA sequence
  source 1..19: mol_type = other DNA
tcggcgacctggagctctg

SEQ ID NO: 457 - DNA, 19 bp, synthetic construct
  misc_feature 1..19: note = gRNA ZNF773_a spacer DNA sequence
  source 1..19: mol_type = other DNA
ggaagctggttgttcgctg

SEQ ID NO: 458 - DNA, 19 bp, synthetic construct
  misc_feature 1..19: note = gRNA ZNF773_b spacer DNA sequence
  source 1..19: mol_type = other DNA
gcaagctgagttctcttga

SEQ ID NO: 459 - DNA, 19 bp, synthetic construct
  misc_feature 1..19: note = gRNA ZNF773_c spacer DNA sequence
  source 1..19: mol_type = other DNA
tcgctgcggcgaccagctc

SEQ ID NO: 460 - DNA, 19 bp, synthetic construct
  misc_feature 1..19: note = gRNA ZNF774_a spacer DNA sequence
  source 1..19: mol_type = other DNA
ggcacagcctcggggttgc

SEQ ID NO: 461 - DNA, 19 bp, synthetic construct
  misc_feature 1..19: note = gRNA ZNF778_a spacer DNA sequence
  source 1..19: mol_type = other DNA
gacagcccgaggacacgcg

SEQ ID NO: 462 - DNA, 19 bp, synthetic construct
  misc_feature 1..19: note = gRNA ZNF778_b spacer DNA sequence
  source 1..19: mol_type = other DNA
tcccggaccagcttccccg

SEQ ID NO: 463 - DNA, 19 bp, synthetic construct
  misc_feature 1..19: note = gRNA ZNF784_a spacer DNA sequence
  source 1..19: mol_type = other DNA
gctcctgggatcgcgactc

SEQ ID NO: 464 - DNA, 19 bp, synthetic construct
  misc_feature 1..19: note = gRNA ZNF789_a spacer DNA sequence
  source 1..19: mol_type = other DNA
ggaacagacacaaccactc

SEQ ID NO: 465 - DNA, 19 bp, synthetic construct
  misc_feature 1..19: note = gRNA ZNF804B_a spacer DNA sequence
  source 1..19: mol_type = other DNA
cgaggtggctgctcaaccg

SEQ ID NO: 466 - DNA, 19 bp, synthetic construct
  misc_feature 1..19: note = gRNA ZNF816_a spacer DNA sequence
  source 1..19: mol_type = other DNA
gagcagattcgcacaaacc

SEQ ID NO: 467 - DNA, 19 bp, synthetic construct
  misc_feature 1..19: note = gRNA ZNF823_a spacer DNA sequence
  source 1..19: mol_type = other DNA
tcccctgggccgcaagatg

SEQ ID NO: 468 - DNA, 19 bp, synthetic construct
  misc_feature 1..19: note = gRNA ZNF83_a spacer DNA sequence
  source 1..19: mol_type = other DNA
tgaggacgatagaacgatt

SEQ ID NO: 469 - DNA, 19 bp, synthetic construct
  misc_feature 1..19: note = gRNA ZNF83_b spacer DNA sequence
  source 1..19: mol_type = other DNA
cttcatgctacacagtcca

SEQ ID NO: 470 - DNA, 19 bp, synthetic construct
  misc_feature 1..19: note = gRNA ZNF831_a spacer DNA sequence
  source 1..19: mol_type = other DNA
cccgcgccccgctagtgac

SEQ ID NO: 471 - DNA, 19 bp, synthetic construct
  misc_feature 1..19: note = gRNA ZNF846_a spacer DNA sequence
  source 1..19: mol_type = other DNA
gacgctccggacttctgct

SEQ ID NO: 472 - DNA, 19 bp, synthetic construct
  misc_feature 1..19: note = gRNA ZNF852_a spacer DNA sequence
  source 1..19: mol_type = other DNA
cgtttggatgattgtctct

SEQ ID NO: 473 - DNA, 19 bp, synthetic construct
  misc_feature 1..19: note = gRNA ZNF879_a spacer DNA sequence
  source 1..19: mol_type = other DNA
acaccgcacaagaggcgag

SEQ ID NO: 474 - DNA, 19 bp, synthetic construct
  misc_feature 1..19: note = gRNA ZNF91_a spacer DNA sequence
  source 1..19: mol_type = other DNA
cgctgccgccggagtttcc

SEQ ID NO: 475 - DNA, 19 bp, synthetic construct
  misc_feature 1..19: note = gRNA ZNF93_a spacer DNA sequence
  source 1..19: mol_type = other DNA
aacagggcggcttctggtt

SEQ ID NO: 476 - DNA, 19 bp, synthetic construct
  misc_feature 1..19: note = gRNA ZNF99_a spacer DNA sequence
  source 1..19: mol_type = other DNA
cacagggccacagaggcta

SEQ ID NO: 477 - DNA, 19 bp, synthetic construct
  misc_feature 1..19: note = gRNA ZNF99_a spacer DNA sequence
  source 1..19: mol_type = other DNA
tagtcacagtgcaggaagg

SEQ ID NO: 478 - DNA, 19 bp, synthetic construct
  misc_feature 1..19: note = gRNA ZSCAN16_a spacer DNA sequence
  source 1..19: mol_type = other DNA
cagccttccgggagaggat

SEQ ID NO: 479 - DNA, 19 bp, synthetic construct
  misc_feature 1..19: note = gRNA ZSCAN2_a spacer DNA sequence
  source 1..19: mol_type = other DNA
cctctccggctcacctctc

SEQ ID NO: 480 - DNA, 19 bp, synthetic construct
  misc_feature 1..19: note = gRNA ZSCAN21_a spacer DNA sequence
  source 1..19: mol_type = other DNA
tcagagccgctccgggtac

SEQ ID NO: 481 - DNA, 19 bp, synthetic construct
  misc_feature 1..19: note = gRNA ZSCAN5A_a spacer DNA sequence
  source 1..19: mol_type = other DNA
taactttctcatcaagctt

SEQ ID NO: 482 - DNA, 19 bp, synthetic construct
  misc_feature 1..19: note = gRNA ZSCAN5A_b spacer DNA sequence
  source 1..19: mol_type = other DNA
tccgcgtcgaggccctacg

SEQ ID NO: 483 - DNA, 19 bp, synthetic construct
  misc_feature 1..19: note = gRNA ZSCAN5B_a spacer DNA sequence
  source 1..19: mol_type = other DNA
attcatgtgccaagtctca

SEQ ID NO: 484 - DNA, 19 bp, synthetic construct
  misc_feature 1..19: note = gRNA ZSCAN5B_bs pacer DNA sequence
  source 1..19: mol_type = other DNA
ggtgagtgtccagcggcga

SEQ ID NO: 485 - RNA, 19 nt, synthetic construct
  misc_feature 1..19: note = gRNA BMP4_a spacer RNA sequence
  source 1..19: mol_type = other RNA
gacagccggcgagcagggg

SEQ ID NO: 486 - RNA, 19 nt, synthetic construct
  misc_feature 1..19: note = gRNA E2F7_a spacer RNA sequence
  source 1..19: mol_type = other RNA
ttagcggggactacgatcc

SEQ ID NO: 487 - RNA, 19 nt, synthetic construct
  misc_feature 1..19: note = gRNA ESRRG_a spacer RNA sequence
  source 1..19: mol_type = other RNA
tggagcccgccgcctccag

SEQ ID NO: 488 - RNA, 19 nt, synthetic construct
  misc_feature 1..19: note = gRNA LYL1_a spacer RNA sequence
  source 1..19: mol_type = other RNA
gtttcctccctctcacccc

SEQ ID NO: 489 - RNA, 19 nt, synthetic construct
  misc_feature 1..19: note = gRNA STAT5A_a spacer RNA sequence
  source 1..19: mol_type = other RNA
ccgcggtccagggataggt

SEQ ID NO: 490 - RNA, 19 nt, synthetic construct
  misc_feature 1..19: note = gRNA THAP10_a spacer RNA sequence
  source 1..19: mol_type = other RNA
cttccggtgaccagaggta

SEQ ID NO: 491 - RNA, 19 nt, synthetic construct
  misc_feature 1..19: note = gRNA ZNF362_a spacer RNA sequence
  source 1..19: mol_type = other RNA
gggtaggaagtgtctcccg

SEQ ID NO: 492 - RNA, 19 nt, synthetic construct
  misc_feature 1..19: note = gRNA ZSCAN1_a spacer RNA sequence
  source 1..19: mol_type = other RNA
ccgcgcgcgggcttcgctc

SEQ ID NO: 493 - RNA, 19 nt, synthetic construct
  misc_feature 1..19: note = gRNA ANHX_a spacer RNA sequence
  source 1..19: mol_type = other RNA
cggaaggtgaggggcgcta

SEQ ID NO: 494 - RNA, 19 nt, synthetic construct
  misc_feature 1..19: note = gRNA CPEB1_a spacer RNA sequence
  source 1..19: mol_type = other RNA
caacatcgtcttccatgtc

SEQ ID NO: 495 - RNA, 19 nt, synthetic construct
  misc_feature 1..19: note = gRNA CSRNP1_a spacer RNA sequence
  source 1..19: mol_type = other RNA
tctgcgcgtccggcagcgg

SEQ ID NO: 496 - RNA, 19 nt, synthetic construct
  misc_feature 1..19: note = gRNA EN2_a spacer RNA sequence
  source 1..19: mol_type = other RNA
ctccgtgtgcgccgcggga

SEQ ID NO: 497 - RNA, 19 nt, synthetic construct
  misc_feature 1..19: note = gRNA EPAS1_a spacer RNA sequence
  source 1..19: mol_type = other RNA
cgccccagcgctcctgagg

SEQ ID NO: 498 - RNA, 19 nt, synthetic construct
  misc_feature 1..19: note = gRNA IRX3_a spacer RNA sequence
  source 1..19: mol_type = other RNA
aagcagcggaagcgatcct

SEQ ID NO: 499 - RNA, 19 nt, synthetic construct
  misc_feature 1..19: note = gRNA LHX8_a spacer RNA sequence
  source 1..19: mol_type = other RNA
cgagctaccagcgctcggg

SEQ ID NO: 500 - RNA, 19 nt, synthetic construct
  misc_feature 1..19: note = gRNANR5A2_aspacer RNA sequence
  source 1..19: mol_type = other RNA
agcatgacaaggcgaccgc

SEQ ID NO: 501 - RNA, 19 nt, synthetic construct
  misc_feature 1..19: note = gRNA PRDM16_a spacer RNA sequence
  source 1..19: mol_type = other RNA
accatgcgatccaaggcga

SEQ ID NO: 502 - RNA, 19 nt, synthetic construct
  misc_feature 1..19: note = gRNA RAX2_a spacer RNA sequence
  source 1..19: mol_type = other RNA
ccggagccgagccaggtcg

SEQ ID NO: 503 - RNA, 19 nt, synthetic construct
  misc_feature 1..19: note = gRNA SCML4_a spacer RNA sequence
  source 1..19: mol_type = other RNA
tgtgagctactaacacggg

SEQ ID NO: 504 - RNA, 19 nt, synthetic construct
  misc_feature 1..19: note = gRNA SMAD1_a spacer RNA sequence
  source 1..19: mol_type = other RNA
gctcctccgagcagacggg

SEQ ID NO: 505 - RNA, 19 nt, synthetic construct
  misc_feature 1..19: note = gRNA SOX6_a spacer RNA sequence
  source 1..19: mol_type = other RNA
tctagccagcccctaagtc

SEQ ID NO: 506 - RNA, 19 nt, synthetic construct
  misc_feature 1..19: note = gRNA SUV39H1_a spacer RNA sequence
  source 1..19: mol_type = other RNA
tcttctcgcgaggccggct

SEQ ID NO: 507 - RNA, 19 nt, synthetic construct
  misc_feature 1..19: note = gRNA TFDP1_a spacer RNA sequence
  source 1..19: mol_type = other RNA
tcccggcgccactcggccc

SEQ ID NO: 508 - RNA, 19 nt, synthetic construct
  misc_feature 1..19: note = gRNA ZNF287_a spacer RNA sequence
  source 1..19: mol_type = other RNA
cagaggcgccggggtttct

SEQ ID NO: 509 - RNA, 19 nt, synthetic construct
  misc_feature 1..19: note = gRNA ZNF438_a spacer RNA sequence
  source 1..19: mol_type = other RNA
gtcacgggcccagcagtcg

SEQ ID NO: 510 - RNA, 19 nt, synthetic construct
  misc_feature 1..19: note = gRNA ZNF681_a spacer RNA sequence
  source 1..19: mol_type = other RNA
aggagaaaggacgcccggg

SEQ ID NO: 511 - RNA, 19 nt, synthetic construct
  misc_feature 1..19: note = gRNA ZNF853_a spacer RNA sequence
  source 1..19: mol_type = other RNA
cctctgcgctagggaggtg

SEQ ID NO: 512 - RNA, 19 nt, synthetic construct
  misc_feature 1..19: note = gRNA BMP4_b spacer RNA sequence
  source 1..19: mol_type = other RNA
gaggaaggaagatgcgaga

SEQ ID NO: 513 - RNA, 19 nt, synthetic construct
  misc_feature 1..19: note = gRNA CARF_a spacer RNA sequence
  source 1..19: mol_type = other RNA
tcccaaccagaggctcact

SEQ ID NO: 514 - RNA, 19 nt, synthetic construct
  misc_feature 1..19: note = gRNAESRRG_bspacer RNA sequence
  source 1..19: mol_type = other RNA
tcttcagctataccaagag

SEQ ID NO: 515 - RNA, 19 nt, synthetic construct
  misc_feature 1..19: note = gRNAESRRG_cspacer RNA sequence
  source 1..19: mol_type = other RNA
tgtgttgtagtgatcatgt

SEQ ID NO: 516 - RNA, 19 nt, synthetic construct
  misc_feature 1..19: note = gRNAFOXR2_aspacer RNA sequence
  source 1..19: mol_type = other RNA
atctagggagcttatcagt

SEQ ID NO: 517 - RNA, 19 nt, synthetic construct
  misc_feature 1..19: note = gRNAHOXA7_aspacer RNA sequence
  source 1..19: mol_type = other RNA
gccgtagccggacgcaaag

SEQ ID NO: 518 - RNA, 19 nt, synthetic construct
  misc_feature 1..19: note = gRNAIRF9_aspacer RNA sequence
  source 1..19: mol_type = other RNA
ggtaagatcagccaaggat

SEQ ID NO: 519 - RNA, 19 nt, synthetic construct
  misc_feature 1..19: note = gRNAKAT5_aspacer RNA sequence
  source 1..19: mol_type = other RNA
gaagtgacgtctcccagag

SEQ ID NO: 520 - RNA, 19 nt, synthetic construct
  misc_feature 1..19: note = gRNAKLF5_aspacer RNA sequence
  source 1..19: mol_type = other RNA
agagcctgagagcacggtg

SEQ ID NO: 521 - RNA, 19 nt, synthetic construct
  misc_feature 1..19: note = gRNANEUROD1_aspacer RNA sequence
  source 1..19: mol_type = other RNA
caggacctactaacaacaa

SEQ ID NO: 522 - RNA, 19 nt, synthetic construct
  misc_feature 1..19: note = gRNAPAX6_aspacer RNA sequence
  source 1..19: mol_type = other RNA
atgttgcggagtgattagt

SEQ ID NO: 523 - RNA, 19 nt, synthetic construct
  misc_feature 1..19: note = gRNAPIN1_aspacer RNA sequence
  source 1..19: mol_type = other RNA
tgcgcttctcccagccggg

SEQ ID NO: 524 - RNA, 19 nt, synthetic construct
  misc_feature 1..19: note = gRNAPURG_aspacer RNA sequence
  source 1..19: mol_type = other RNA
ggtgtccgaagtcaggcgg

SEQ ID NO: 525 - RNA, 19 nt, synthetic construct
  misc_feature 1..19: note = gRNAPURG_bspacer RNA sequence
  source 1..19: mol_type = other RNA
tggtcgtgaagggcatcgg

SEQ ID NO: 526 - RNA, 19 nt, synthetic construct
  misc_feature 1..19: note = gRNARARA_aspacer RNA sequence
  source 1..19: mol_type = other RNA
catagcgagtcacgtgcgg

SEQ ID NO: 527 - RNA, 19 nt, synthetic construct
  misc_feature 1..19: note = gRNASNAPC5_aspacer RNA sequence
  source 1..19: mol_type = other RNA
tgccgggccgacagcagcc

SEQ ID NO: 528 - RNA, 19 nt, synthetic construct
  misc_feature 1..19: note = gRNASTAT5A_ bspacer RNA sequence
  source 1..19: mol_type = other RNA
cctcataagtaactaggct

SEQ ID NO: 529 - RNA, 19 nt, synthetic construct
  misc_feature 1..19: note = gRNATBX22_aspacer RNA sequence
  source 1..19: mol_type = other RNA
ttagtgggacatcagtaca

SEQ ID NO: 530 - RNA, 19 nt, synthetic construct
  misc_feature 1..19: note = gRNAWT1_aspacer RNA sequence
  source 1..19: mol_type = other RNA
caaggcagcgcccacaccc

SEQ ID NO: 531 - RNA, 19 nt, synthetic construct
  misc_feature 1..19: note = gRNA ZNF138_a spacer RNA sequence
  source 1..19: mol_type = other RNA
tgcgtcctcttactcctag

SEQ ID NO: 532 - RNA, 19 nt, synthetic construct
  misc_feature 1..19: note = gRNA ZNF143_a spacer RNA sequence
  source 1..19: mol_type = other RNA
tgtcctggtgcatggtggt

SEQ ID NO: 533 - RNA, 19 nt, synthetic construct
  misc_feature 1..19: note = gRNA ZNF205_a spacer RNA sequence
  source 1..19: mol_type = other RNA
ctccacagcctgcacgggg

SEQ ID NO: 534 - RNA, 19 nt, synthetic construct
  misc_feature 1..19: note = gRNA ZNF235_a spacer RNA sequence
  source 1..19: mol_type = other RNA
agagggctcggagaagtct

SEQ ID NO: 535 - RNA, 19 nt, synthetic construct
  misc_feature 1..19: note = gRNA ZNF526_a spacer RNA sequence
  source 1..19: mol_type = other RNA
gattggtcgccacgggtaa

SEQ ID NO: 536 - RNA, 19 nt, synthetic construct
  misc_feature 1..19: note = gRNA ZNF548_a spacer RNA sequence
  source 1..19: mol_type = other RNA
agcactgggaggaccggtc

SEQ ID NO: 537 - RNA, 19 nt, synthetic construct
  misc_feature 1..19: note = gRNA ZNF559_a spacer RNA sequence
  source 1..19: mol_type = other RNA
ctgtcctcaggggtcgagg

SEQ ID NO: 538 - RNA, 19 nt, synthetic construct
  misc_feature 1..19: note = gRNA ZNF611_a spacer RNA sequence
  source 1..19: mol_type = other RNA
tgcgctaactaggttccca

SEQ ID NO: 539 - RNA, 19 nt, synthetic construct
  misc_feature 1..19: note = gRNA ZNF655_a spacer RNA sequence
  source 1..19: mol_type = other RNA
ccgcgaggtgaatgaacca

SEQ ID NO: 540 - RNA, 19 nt, synthetic construct
  misc_feature 1..19: note = gRNA ZNF672_a spacer RNA sequence
  source 1..19: mol_type = other RNA
caccggttgctgggaagac

SEQ ID NO: 541 - RNA, 19 nt, synthetic construct
  misc_feature 1..19: note = gRNA ZNF699_a spacer RNA sequence
  source 1..19: mol_type = other RNA
cggacaaggagtggcgggg

SEQ ID NO: 542 - RNA, 19 nt, synthetic construct
  misc_feature 1..19: note = gRNA ZNF706_a spacer RNA sequence
  source 1..19: mol_type = other RNA
cactctggcagctgaccgg

SEQ ID NO: 543 - RNA, 19 nt, synthetic construct
  misc_feature 1..19: note = gRNA ZNF714_a spacer RNA sequence
  source 1..19: mol_type = other RNA
ctgacctggagtcctctca

SEQ ID NO: 544 - RNA, 19 nt, synthetic construct
  misc_feature 1..19: note = gRNA ZNF772_a spacer RNA sequence
  source 1..19: mol_type = other RNA
tagtccacaggcctgatgg

SEQ ID NO: 545 - RNA, 19 nt, synthetic construct
  misc_feature 1..19: note = gRNA ZNF782_a spacer RNA sequence
  source 1..19: mol_type = other RNA
gggtcggctcggaaagtag

SEQ ID NO: 546 - RNA, 19 nt, synthetic construct
  misc_feature 1..19: note = gRNA ZSCAN1_a spacer RNA sequence
  source 1..19: mol_type = other RNA
tcgccgtaggggagggaag

SEQ ID NO: 547 - RNA, 19 nt, synthetic construct
  misc_feature 1..19: note = gRNA ZSCAN26_a spacer RNA sequence
  source 1..19: mol_type = other RNA
tccttctgcgatgcctaag

SEQ ID NO: 548 - RNA, 19 nt, synthetic construct
  misc_feature 1..19: note = gRNA ADNP_a spacer RNA sequence
  source 1..19: mol_type = other RNA
tgtctgctgaggggagacg

SEQ ID NO: 549 - RNA, 19 nt, synthetic construct
  misc_feature 1..19: note = gRNA AHRR_a spacer RNA sequence
  source 1..19: mol_type = other RNA
gccagggcgcgctgccccg

SEQ ID NO: 550 - RNA, 19 nt, synthetic construct
  misc_feature 1..19: note = gRNA AKNA_a spacer RNA sequence
  source 1..19: mol_type = other RNA
ccaggaaaccacccgcgct

SEQ ID NO: 551 - RNA, 19 nt, synthetic construct
  misc_feature 1..19: note = gRNA ALX3_a spacer RNA sequence
  source 1..19: mol_type = other RNA
cctgcacccggcccctatg

SEQ ID NO: 552 - RNA, 19 nt, synthetic construct
  misc_feature 1..19: note = gRNA ALX4_a spacer RNA sequence
  source 1..19: mol_type = other RNA
tgcgacaccgggctgtagt

SEQ ID NO: 553 - RNA, 19 nt, synthetic construct
  misc_feature 1..19: note = gRNA ANHX_b spacer RNA sequence
  source 1..19: mol_type = other RNA
aagcgggtcccggagggtg

SEQ ID NO: 554 - RNA, 19 nt, synthetic construct
  misc_feature 1..19: note = gRNA AR_a spacer RNA sequence
  source 1..19: mol_type = other RNA
gcttgctgggagagcggga

SEQ ID NO: 555 - RNA, 19 nt, synthetic construct
  misc_feature 1..19: note = gRNA ARHGAP35_a spacer RNA sequence
  source 1..19: mol_type = other RNA
cagtgtggtgggattatct

SEQ ID NO: 556 - RNA, 19 nt, synthetic construct
  misc_feature 1..19: note = gRNA ARID3C_a spacer RNA sequence
  source 1..19: mol_type = other RNA
agaggtatcaggcagagac

SEQ ID NO: 557 - RNA, 19 nt, synthetic construct
  misc_feature 1..19: note = gRNA ARID5B_a spacer RNA sequence
  source 1..19: mol_type = other RNA
agaaagaggagcagcgccc

SEQ ID NO: 558 - RNA, 19 nt, synthetic construct
  misc_feature 1..19: note = gRNA ASCL5_a spacer RNA sequence
  source 1..19: mol_type = other RNA
tggctcccggtgctgtggc

SEQ ID NO: 559 - RNA, 19 nt, synthetic construct
  misc_feature 1..19: note = gRNA ATF6B_a spacer RNA sequence
  source 1..19: mol_type = other RNA
ggccttgggaaccgtctcc

SEQ ID NO: 560 - RNA, 19 nt, synthetic construct
  misc_feature 1..19: note = gRNA ATOH7_a spacer RNA sequence
  source 1..19: mol_type = other RNA
cttcctgcaaaggagtctc

SEQ ID NO: 561 - RNA, 19 nt, synthetic construct
  misc_feature 1..19: note = gRNA BARHL1_a spacer RNA sequence
  source 1..19: mol_type = other RNA
tctaatgcgcagaggaggt

SEQ ID NO: 562 - RNA, 19 nt, synthetic construct
  misc_feature 1..19: note = gRNA BARHL2_a spacer RNA sequence
  source 1..19: mol_type = other RNA
tttcttcgctggttcgggg

SEQ ID NO: 563 - RNA, 19 nt, synthetic construct
  misc_feature 1..19: note = gRNA BATF_a spacer RNA sequence
  source 1..19: mol_type = other RNA
cagagtgaggaggacgcag

SEQ ID NO: 564 - RNA, 19 nt, synthetic construct
  misc_feature 1..19: note = gRNA BBX_a spacer RNA sequence
  source 1..19: mol_type = other RNA
agccctcagcggccagtca

SEQ ID NO: 565 - RNA, 19 nt, synthetic construct
  misc_feature 1..19: note = gRNA BHLHE40_a spacer RNA sequence
  source 1..19: mol_type = other RNA
tccgactcagcgcacagac

SEQ ID NO: 566 - RNA, 19 nt, synthetic construct
  misc_feature 1..19: note = gRNA BNC2_a spacer RNA sequence
  source 1..19: mol_type = other RNA
agaggagaccaagaggcgg

SEQ ID NO: 567 - RNA, 19 nt, synthetic construct
  misc_feature 1..19: note = gRNA BRD4_a spacer RNA sequence
  source 1..19: mol_type = other RNA
cagtggcaacacccacaag

SEQ ID NO: 568 - RNA, 19 nt, synthetic construct
  misc_feature 1..19: note = gRNA BRD9_a spacer RNA sequence
  source 1..19: mol_type = other RNA
ccagcgagctcggcaacct

SEQ ID NO: 569 - RNA, 19 nt, synthetic construct
  misc_feature 1..19: note = gRNA BSX_a spacer RNA sequence
  source 1..19: mol_type = other RNA
gacaagggccgggacgaag

SEQ ID NO: 570 - RNA, 19 nt, synthetic construct
  misc_feature 1..19: note = gRNA CCDC17_a spacer RNA sequence
  source 1..19: mol_type = other RNA
tgggtggctaacagagctg

SEQ ID NO: 571 - RNA, 19 nt, synthetic construct
  misc_feature 1..19: note = gRNA CDX1_a spacer RNA sequence
  source 1..19: mol_type = other RNA
cggttgctcgtcgtcgggg

SEQ ID NO: 572 - RNA, 19 nt, synthetic construct
  misc_feature 1..19: note = gRNA CDX2_a spacer RNA sequence
  source 1..19: mol_type = other RNA
ccttcccactaggctgcag

SEQ ID NO: 573 - RNA, 19 nt, synthetic construct
  misc_feature 1..19: note = gRNA CDX4_a spacer RNA sequence
  source 1..19: mol_type = other RNA
gtttcttacgagggtatcc

SEQ ID NO: 574 - RNA, 19 nt, synthetic construct
  misc_feature 1..19: note = gRNA CEBPB_a spacer RNA sequence
  source 1..19: mol_type = other RNA
gtggccgctattagtgagg

SEQ ID NO: 575 - RNA, 19 nt, synthetic construct
  misc_feature 1..19: note = gRNACENPB_aspacer RNA sequence
  source 1..19: mol_type = other RNA
cgggccgggggcacctccg

SEQ ID NO: 576 - RNA, 19 nt, synthetic construct
  misc_feature 1..19: note = gRNACLOCK_aspacer RNA sequence
  source 1..19: mol_type = other RNA
cgccgccaaggaagccaac

SEQ ID NO: 577 - RNA, 19 nt, synthetic construct
  misc_feature 1..19: note = gRNACREB3_aspacer RNA sequence
  source 1..19: mol_type = other RNA
tgggaggcgggtccggaga

SEQ ID NO: 578 - RNA, 19 nt, synthetic construct
  misc_feature 1..19: note = gRNACREB3L4_aspacer RNA sequence
  source 1..19: mol_type = other RNA
aaagcgagggctacagaac

SEQ ID NO: 579 - RNA, 19 nt, synthetic construct
  misc_feature 1..19: note = gRNACSRNP3_aspacer RNA sequence
  source 1..19: mol_type = other RNA
cacggcatcagcctcactg

SEQ ID NO: 580 - RNA, 19 nt, synthetic construct
  misc_feature 1..19: note = gRNACTCF_aspacer RNA sequence
  source 1..19: mol_type = other RNA
cgcggagctgcttctttgg

SEQ ID NO: 581 - RNA, 19 nt, synthetic construct
  misc_feature 1..19: note = gRNACUX1_aspacer RNA sequence
  source 1..19: mol_type = other RNA
tgagcggctgatagagagg

SEQ ID NO: 582 - RNA, 19 nt, synthetic construct
  misc_feature 1..19: note = gRNACUX2_aspacer RNA sequence
  source 1..19: mol_type = other RNA
gcgcgccctgggcgcattg

SEQ ID NO: 583 - RNA, 19 nt, synthetic construct
  misc_feature 1..19: note = gRNADACH2_aspacer RNA sequence
  source 1..19: mol_type = other RNA
ggcccggaataagcccccc

SEQ ID NO: 584 - RNA, 19 nt, synthetic construct
  misc_feature 1..19: note = gRNADLX1_aspacer RNA sequence
  source 1..19: mol_type = other RNA
ctccccaggaaccaaccag

SEQ ID NO: 585 - RNA, 19 nt, synthetic construct
  misc_feature 1..19: note = gRNADLX4_aspacer RNA sequence
  source 1..19: mol_type = other RNA
aagcggaagccagcacgca

SEQ ID NO: 586 - RNA, 19 nt, synthetic construct
  misc_feature 1..19: note = gRNADLX5_aspacer RNA sequence
  source 1..19: mol_type = other RNA
gccgcggcgaggaggagac

SEQ ID NO: 587 - RNA, 19 nt, synthetic construct
  misc_feature 1..19: note = gRNADLX6_aspacer RNA sequence
  source 1..19: mol_type = other RNA
gagtggctcatgtaggggt

SEQ ID NO: 588 - RNA, 19 nt, synthetic construct
  misc_feature 1..19: note = gRNADMRTB1_aspacer RNA sequence
  source 1..19: mol_type = other RNA
aggctgggcatcgccacgg

SEQ ID NO: 589 - RNA, 19 nt, synthetic construct
  misc_feature 1..19: note = gRNADNMT3B_aspacer RNA sequence
  source 1..19: mol_type = other RNA
gactcgcccccaatcctgg

SEQ ID NO: 590 - RNA, 19 nt, synthetic construct
  misc_feature 1..19: note = gRNADOT1L_aspacer RNA sequence
  source 1..19: mol_type = other RNA
gcttcacgccggcccaaga

SEQ ID NO: 591 - RNA, 19 nt, synthetic construct
  misc_feature 1..19: note = gRNADPF1_aspacer RNA sequence
  source 1..19: mol_type = other RNA
ctacgatttcattcattct

SEQ ID NO: 592 - RNA, 19 nt, synthetic construct
  misc_feature 1..19: note = gRNADR1_aspacer RNA sequence
  source 1..19: mol_type = other RNA
gtagcccgaacgcagatcg

SEQ ID NO: 593 - RNA, 19 nt, synthetic construct
  misc_feature 1..19: note = gRNAE2F2_aspacer RNA sequence
  source 1..19: mol_type = other RNA
gcgatgcgctgggatgggg

SEQ ID NO: 594 - RNA, 19 nt, synthetic construct
  misc_feature 1..19: note = gRNAE2F3_aspacer RNA sequence
  source 1..19: mol_type = other RNA
cccggagggccgaacagac

SEQ ID NO: 595 - RNA, 19 nt, synthetic construct
  misc_feature 1..19: note = gRNAEBF3_aspacer RNA sequence
  source 1..19: mol_type = other RNA
ggaaagggtccattcctcg

SEQ ID NO: 596 - RNA, 19 nt, synthetic construct
  misc_feature 1..19: note = gRNAEGR2_aspacer RNA sequence
  source 1..19: mol_type = other RNA
cagcagccggaacacagac

SEQ ID NO: 597 - RNA, 19 nt, synthetic construct
  misc_feature 1..19: note = gRNAEHF_aspacer RNA sequence
  source 1..19: mol_type = other RNA
aatctcaccagctcctata

SEQ ID NO: 598 - RNA, 19 nt, synthetic construct
  misc_feature 1..19: note = gRNAELF5_aspacer RNA sequence
  source 1..19: mol_type = other RNA
gtggctaggtccaaagagg

SEQ ID NO: 599 - RNA, 19 nt, synthetic construct
  misc_feature 1..19: note = gRNAELF5_bspacer RNA sequence
  source 1..19: mol_type = other RNA
aggctttcaaggcaagaga

SEQ ID NO: 600 - RNA, 19 nt, synthetic construct
  misc_feature 1..19: note = gRNAELMSAN1_aspacer RNA sequence
  source 1..19: mol_type = other RNA
gcgccgttggcctgaggta

SEQ ID NO: 601 - RNA, 19 nt, synthetic construct
  misc_feature 1..19: note = gRNAEMX1_aspacer RNA sequence
  source 1..19: mol_type = other RNA
aggccgctagaatggaccc

SEQ ID NO: 602 - RNA, 19 nt, synthetic construct
  misc_feature 1..19: note = gRNAETS2_aspacer RNA sequence
  source 1..19: mol_type = other RNA
ctccagagactgacgagtg

SEQ ID NO: 603 - RNA, 19 nt, synthetic construct
  misc_feature 1..19: note = gRNAETV4_aspacer RNA sequence
  source 1..19: mol_type = other RNA
cctcaggtgaggctgcggg

SEQ ID NO: 604 - RNA, 19 nt, synthetic construct
  misc_feature 1..19: note = gRNAETV4_bspacer RNA sequence
  source 1..19: mol_type = other RNA
cttttgtgaatggaacccc

SEQ ID NO: 605 - RNA, 19 nt, synthetic construct
  misc_feature 1..19: note = gRNAETV6_aspacer RNA sequence
  source 1..19: mol_type = other RNA
cggctgccgggagagatgc

SEQ ID NO: 606 - RNA, 19 nt, synthetic construct
  misc_feature 1..19: note = gRNAEZH1_aspacer RNA sequence
  source 1..19: mol_type = other RNA
acccgcggctcgggatgga

SEQ ID NO: 607 - RNA, 19 nt, synthetic construct
  misc_feature 1..19: note = gRNAFERD3L_aspacer RNA sequence
  source 1..19: mol_type = other RNA
cacatccattggcagatgg

SEQ ID NO: 608 - RNA, 19 nt, synthetic construct
  misc_feature 1..19: note = gRNAFERD3L_bspacer RNA sequence
  source 1..19: mol_type = other RNA
aacaaggaactgtcccggg

SEQ ID NO: 609 - RNA, 19 nt, synthetic construct
  misc_feature 1..19: note = gRNAFIZ1_aspacer RNA sequence
  source 1..19: mol_type = other RNA
ccgacattttgggcagcgg

SEQ ID NO: 610 - RNA, 19 nt, synthetic construct
  misc_feature 1..19: note = gRNAFOS_aspacer RNA sequence
  source 1..19: mol_type = other RNA
tagtaagagaggctatccc

SEQ ID NO: 611 - RNA, 19 nt, synthetic construct
  misc_feature 1..19: note = gRNAFOSB_aspacer RNA sequence
  source 1..19: mol_type = other RNA
cagagctacggccacggca

SEQ ID NO: 612 - RNA, 19 nt, synthetic construct
  misc_feature 1..19: note = gRNAFOXA1_aspacer RNA sequence
  source 1..19: mol_type = other RNA
gcagcccgctcacttcccg

SEQ ID NO: 613 - RNA, 19 nt, synthetic construct
  misc_feature 1..19: note = gRNAFOXA2_aspacer RNA sequence
  source 1..19: mol_type = other RNA
agctactatgcagagcccg

SEQ ID NO: 614 - RNA, 19 nt, synthetic construct
  misc_feature 1..19: note = gRNAFOXA3_aspacer RNA sequence
  source 1..19: mol_type = other RNA
ctcgggacagccgtacccc

SEQ ID NO: 615 - RNA, 19 nt, synthetic construct
  misc_feature 1..19: note = gRNAFOXC2_aspacer RNA sequence
  source 1..19: mol_type = other RNA
cggcgctcgggccgagcag

SEQ ID NO: 616 - RNA, 19 nt, synthetic construct
  misc_feature 1..19: note = gRNAFOXD3_aspacer RNA sequence
  source 1..19: mol_type = other RNA
cgcagggtgcaggccgtag

SEQ ID NO: 617 - RNA, 19 nt, synthetic construct
  misc_feature 1..19: note = gRNAFOXE1_aspacer RNA sequence
  source 1..19: mol_type = other RNA
tcccctgcacacaccggac

SEQ ID NO: 618 - RNA, 19 nt, synthetic construct
  misc_feature 1..19: note = gRNAFOXJ3_aspacer RNA sequence
  source 1..19: mol_type = other RNA
ggcctcgaccgctcgcagt

SEQ ID NO: 619 - RNA, 19 nt, synthetic construct
  misc_feature 1..19: note = gRNAFOXN2_aspacer RNA sequence
  source 1..19: mol_type = other RNA
agtcgcctccgggaagacg

SEQ ID NO: 620 - RNA, 19 nt, synthetic construct
  misc_feature 1..19: note = gRNAFOXN4_aspacer RNA sequence
  source 1..19: mol_type = other RNA
acgcgaggggcgagcgcga

SEQ ID NO: 621 - RNA, 19 nt, synthetic construct
  misc_feature 1..19: note = gRNAFOXO1_aspacer RNA sequence
  source 1..19: mol_type = other RNA
ccgcaggagagccaagagg

SEQ ID NO: 622 - RNA, 19 nt, synthetic construct
  misc_feature 1..19: note = gRNAFOXP3_aspacer RNA sequence
  source 1..19: mol_type = other RNA
agagcagggacactcacct

SEQ ID NO: 623 - RNA, 19 nt, synthetic construct
  misc_feature 1..19: note = gRNAFOXS1_aspacer RNA sequence
  source 1..19: mol_type = other RNA
atgaccgcaagccaggcaa

SEQ ID NO: 624 - RNA, 19 nt, synthetic construct
  misc_feature 1..19: note = gRNAGATA2_aspacer RNA sequence
  source 1..19: mol_type = other RNA
gcgaggccagcgtcgcccc

SEQ ID NO: 625 - RNA, 19 nt, synthetic construct
  misc_feature 1..19: note = gRNAGATA3_aspacer RNA sequence
  source 1..19: mol_type = other RNA
tcgctacccaggttggtac

SEQ ID NO: 626 - RNA, 19 nt, synthetic construct
  misc_feature 1..19: note = gRNAGATAD2A_aspacer RNA sequence
  source 1..19: mol_type = other RNA
ctccatgtgtgcggccgag

SEQ ID NO: 627 - RNA, 19 nt, synthetic construct
  misc_feature 1..19: note = gRNAGCM2_aspacer RNA sequence
  source 1..19: mol_type = other RNA
caatggttatggacccggg

SEQ ID NO: 628 - RNA, 19 nt, synthetic construct
  misc_feature 1..19: note = gRNAGFI1_aspacer RNA sequence
  source 1..19: mol_type = other RNA
ggctcggcggacctacctg

SEQ ID NO: 629 - RNA, 19 nt, synthetic construct
  misc_feature 1..19: note = gRNAGLI2_aspacer RNA sequence
  source 1..19: mol_type = other RNA
ttgcttgccaaggggccca

SEQ ID NO: 630 - RNA, 19 nt, synthetic construct
  misc_feature 1..19: note = gRNAGLYR1_aspacer RNA sequence
  source 1..19: mol_type = other RNA
cggctgtgagtctgcggct

SEQ ID NO: 631 - RNA, 19 nt, synthetic construct
  misc_feature 1..19: note = gRNAGPBP1L1_aspacer RNA sequence
  source 1..19: mol_type = other RNA
cagcttgtcgacccggcag

SEQ ID NO: 632 - RNA, 19 nt, synthetic construct
  misc_feature 1..19: note = gRNAGRHL1_aspacer RNA sequence
  source 1..19: mol_type = other RNA
acagtacacccgatccggg

SEQ ID NO: 633 - RNA, 19 nt, synthetic construct
  misc_feature 1..19: note = gRNAGTF2B_aspacer RNA sequence
  source 1..19: mol_type = other RNA
gcctccgggcagcctcgta

SEQ ID NO: 634 - RNA, 19 nt, synthetic construct
  misc_feature 1..19: note = gRNAGTF2I_aspacer RNA sequence
  source 1..19: mol_type = other RNA
gcgaggggcccgtgcgtgt

SEQ ID NO: 635 - RNA, 19 nt, synthetic construct
  misc_feature 1..19: note = gRNAHDAC2_aspacer RNA sequence
  source 1..19: mol_type = other RNA
gctcggtaccacccggcag

SEQ ID NO: 636 - RNA, 19 nt, synthetic construct
  misc_feature 1..19: note = gRNAHES2_aspacer RNA sequence
  source 1..19: mol_type = other RNA
gggtctcaactgttacgtg

SEQ ID NO: 637 - RNA, 19 nt, synthetic construct
  misc_feature 1..19: note = gRNAHES7_aspacer RNA sequence
  source 1..19: mol_type = other RNA
ggaggagcaatggtcaccc

SEQ ID NO: 638 - RNA, 19 nt, synthetic construct
  misc_feature 1..19: note = gRNAHESX1_aspacer RNA sequence
  source 1..19: mol_type = other RNA
gctctgccccacgtgtata

SEQ ID NO: 639 - RNA, 19 nt, synthetic construct
  misc_feature 1..19: note = gRNAHEY1_aspacer RNA sequence
  source 1..19: mol_type = other RNA
gagctggacgagaccatcg

SEQ ID NO: 640 - RNA, 19 nt, synthetic construct
  misc_feature 1..19: note = gRNAHIF3A_aspacer RNA sequence
  source 1..19: mol_type = other RNA
tacgagtgggtgcgcacgg

SEQ ID NO: 641 - RNA, 19 nt, synthetic construct
  misc_feature 1..19: note = gRNAHIVEP3_aspacer RNA sequence
  source 1..19: mol_type = other RNA
ggagaactgtgttggaggg

SEQ ID NO: 642 - RNA, 19 nt, synthetic construct
  misc_feature 1..19: note = gRNAHLF_aspacer RNA sequence
  source 1..19: mol_type = other RNA
aggaaaagtgataaaagag

SEQ ID NO: 643 - RNA, 19 nt, synthetic construct
  misc_feature 1..19: note = gRNAHLX_aspacer RNA sequence
  source 1..19: mol_type = other RNA
gcagtaagcggccgaccag

SEQ ID NO: 644 - RNA, 19 nt, synthetic construct
  misc_feature 1..19: note = gRNAHMG20A_aspacer RNA sequence
  source 1..19: mol_type = other RNA
aagtgaaggcgattgagag

SEQ ID NO: 645 - RNA, 19 nt, synthetic construct
  misc_feature 1..19: note = gRNAHMGA2_aspacer RNA sequence
  source 1..19: mol_type = other RNA
atcaacaccggacgtccag

SEQ ID NO: 646 - RNA, 19 nt, synthetic construct
  misc_feature 1..19: note = gRNAHMGA2_bspacer RNA sequence
  source 1..19: mol_type = other RNA
ttcgggagatgaggtgata

SEQ ID NO: 647 - RNA, 19 nt, synthetic construct
  misc_feature 1..19: note = gRNAHMGA2_cspacer RNA sequence
  source 1..19: mol_type = other RNA
gtccctgggctgaagtgga

SEQ ID NO: 648 - RNA, 19 nt, synthetic construct
  misc_feature 1..19: note = gRNAHMGN3_aspacer RNA sequence
  source 1..19: mol_type = other RNA
cctcattggagcagcaggg

SEQ ID NO: 649 - RNA, 19 nt, synthetic construct
  misc_feature 1..19: note = gRNAHMX2_aspacer RNA sequence
  source 1..19: mol_type = other RNA
gggacatgcaggcaccgga

SEQ ID NO: 650 - RNA, 19 nt, synthetic construct
  misc_feature 1..19: note = gRNAHNF1A_aspacer RNA sequence
  source 1..19: mol_type = other RNA
atgtaaacagaacaggcag

SEQ ID NO: 651 - RNA, 19 nt, synthetic construct
  misc_feature 1..19: note = gRNAHNF4G_aspacer RNA sequence
  source 1..19: mol_type = other RNA
agattctatataattcaag

SEQ ID NO: 652 - RNA, 19 nt, synthetic construct
  misc_feature 1..19: note = gRNAHNF4G_bspacer RNA sequence
  source 1..19: mol_type = other RNA
agccgcccgaggggaaccg

SEQ ID NO: 653 - RNA, 19 nt, synthetic construct
  misc_feature 1..19: note = gRNAHOXA1_aspacer RNA sequence
  source 1..19: mol_type = other RNA
ttcttctccggccccatgg

SEQ ID NO: 654 - RNA, 19 nt, synthetic construct
  misc_feature 1..19: note = gRNAHOXA11_aspacer RNA sequence
  source 1..19: mol_type = other RNA
ggcgcgaagacggggtctg

SEQ ID NO: 655 - RNA, 19 nt, synthetic construct
  misc_feature 1..19: note = gRNAHOXB1_aspacer RNA sequence
  source 1..19: mol_type = other RNA
atactgccgaaaggttgta

SEQ ID NO: 656 - RNA, 19 nt, synthetic construct
  misc_feature 1..19: note = gRNAHOXB2_aspacer RNA sequence
  source 1..19: mol_type = other RNA
ggtggggagattttcccct

SEQ ID NO: 657 - RNA, 19 nt, synthetic construct
  misc_feature 1..19: note = gRNAHOXB3_aspacer RNA sequence
  source 1..19: mol_type = other RNA
ttaactgctcgctgtggtg

SEQ ID NO: 658 - RNA, 19 nt, synthetic construct
  misc_feature 1..19: note = gRNAHOXC12_aspacer RNA sequence
  source 1..19: mol_type = other RNA
acactgggctgccgaggta

SEQ ID NO: 659 - RNA, 19 nt, synthetic construct
  misc_feature 1..19: note = gRNAHOXC9_aspacer RNA sequence
  source 1..19: mol_type = other RNA
ccgtacgggtgatatacca

SEQ ID NO: 660 - RNA, 19 nt, synthetic construct
  misc_feature 1..19: note = gRNAHOXC9_aspacer RNA sequence
  source 1..19: mol_type = other RNA
ggcttgggcgcgaagctac

SEQ ID NO: 661 - RNA, 19 nt, synthetic construct
  misc_feature 1..19: note = gRNAHOXD9_aspacer RNA sequence
  source 1..19: mol_type = other RNA
cggcggacagtgtaatgtt

SEQ ID NO: 662 - RNA, 19 nt, synthetic construct
  misc_feature 1..19: note = gRNAHSF4_aspacer RNA sequence
  source 1..19: mol_type = other RNA
gcatggtgcagtctcggcc

SEQ ID NO: 663 - RNA, 19 nt, synthetic construct
  misc_feature 1..19: note = gRNAHSF5_aspacer RNA sequence
  source 1..19: mol_type = other RNA
cagggcgaggcgaaggccg

SEQ ID NO: 664 - RNA, 19 nt, synthetic construct
  misc_feature 1..19: note = gRNAIKZF1_aspacer RNA sequence
  source 1..19: mol_type = other RNA
tgcgccgcgcggggaccca

SEQ ID NO: 665 - RNA, 19 nt, synthetic construct
  misc_feature 1..19: note = gRNAIKZF2_aspacer RNA sequence
  source 1..19: mol_type = other RNA
gcagtggatctgtagctaa

SEQ ID NO: 666 - RNA, 19 nt, synthetic construct
  misc_feature 1..19: note = gRNAIKZF3_aspacer RNA sequence
  source 1..19: mol_type = other RNA
gcgcgctgagtccaggcga

SEQ ID NO: 667 - RNA, 19 nt, synthetic construct
  misc_feature 1..19: note = gRNAIKZF4_aspacer RNA sequence
  source 1..19: mol_type = other RNA
tccctcgccgtttccaagg

SEQ ID NO: 668 - RNA, 19 nt, synthetic construct
  misc_feature 1..19: note = gRNAIRF7_aspacer RNA sequence
  source 1..19: mol_type = other RNA
ctctggcacccaggtactg

SEQ ID NO: 669 - RNA, 19 nt, synthetic construct
  misc_feature 1..19: note = gRNAIRX3_aspacer RNA sequence
  source 1..19: mol_type = other RNA
gtaaggcagccaaaagttg

SEQ ID NO: 670 - RNA, 19 nt, synthetic construct
  misc_feature 1..19: note = gRNAISL2_aspacer RNA sequence
  source 1..19: mol_type = other RNA
actaactcctactgccccg

SEQ ID NO: 671 - RNA, 19 nt, synthetic construct
  misc_feature 1..19: note = gRNAJRK_aspacer RNA sequence
  source 1..19: mol_type = other RNA
agtggccggcacttccggc

SEQ ID NO: 672 - RNA, 19 nt, synthetic construct
  misc_feature 1..19: note = gRNAJRK_bspacer RNA sequence
  source 1..19: mol_type = other RNA
tcctgaccgtcatcagcaa

SEQ ID NO: 673 - RNA, 19 nt, synthetic construct
  misc_feature 1..19: note = gRNAJRKL_aspacer RNA sequence
  source 1..19: mol_type = other RNA
gactgccgcgcgatagtca

SEQ ID NO: 674 - RNA, 19 nt, synthetic construct
  misc_feature 1..19: note = gRNAKAT7_aspacer RNA sequence
  source 1..19: mol_type = other RNA
gctccagacgctgagaggc

SEQ ID NO: 675 - RNA, 19 nt, synthetic construct
  misc_feature 1..19: note = gRNAKDM1A_aspacer RNA sequence
  source 1..19: mol_type = other RNA
cacggagcgacagagcgag

SEQ ID NO: 676 - RNA, 19 nt, synthetic construct
  misc_feature 1..19: note = gRNAKDM2B_aspacer RNA sequence
  source 1..19: mol_type = other RNA
ctcggcttccatacctata

SEQ ID NO: 677 - RNA, 19 nt, synthetic construct
  misc_feature 1..19: note = gRNAKDM5D_aspacer RNA sequence
  source 1..19: mol_type = other RNA
aactaggatccctgacgat

SEQ ID NO: 678 - RNA, 19 nt, synthetic construct
  misc_feature 1..19: note = gRNAKLF14_aspacer RNA sequence
  source 1..19: mol_type = other RNA
ctcggcggcgaagtagtcc

SEQ ID NO: 679 - RNA, 19 nt, synthetic construct
  misc_feature 1..19: note = gRNAKLF9_aspacer RNA sequence
  source 1..19: mol_type = other RNA
caagggagccggctcagag

SEQ ID NO: 680 - RNA, 19 nt, synthetic construct
  misc_feature 1..19: note = gRNAKMT2B_aspacer RNA sequence
  source 1..19: mol_type = other RNA
catcttggcaccgtgagag

SEQ ID NO: 681 - RNA, 19 nt, synthetic construct
  misc_feature 1..19: note = gRNAKMT2B_bspacer RNA sequence
  source 1..19: mol_type = other RNA
gggccaaaaaagtaaagat

SEQ ID NO: 682 - RNA, 19 nt, synthetic construct
  misc_feature 1..19: note = gRNAL3MBTL4_aspacer RNA sequence
  source 1..19: mol_type = other RNA
acgccgaccgagctacagg

SEQ ID NO: 683 - RNA, 19 nt, synthetic construct
  misc_feature 1..19: note = gRNALEF1_aspacer RNA sequence
  source 1..19: mol_type = other RNA
gctctcgggccgaggaacc

SEQ ID NO: 684 - RNA, 19 nt, synthetic construct
  misc_feature 1..19: note = gRNALHX6_aspacer RNA sequence
  source 1..19: mol_type = other RNA
agaagctggcggacatgac

SEQ ID NO: 685 - RNA, 19 nt, synthetic construct
  misc_feature 1..19: note = gRNALHX9_aspacer RNA sequence
  source 1..19: mol_type = other RNA
gggaacttgcaagcagcca

SEQ ID NO: 686 - RNA, 19 nt, synthetic construct
  misc_feature 1..19: note = gRNALIN28A_aspacer RNA sequence
  source 1..19: mol_type = other RNA
aagtccgaaggcaaagggt

SEQ ID NO: 687 - RNA, 19 nt, synthetic construct
  misc_feature 1..19: note = gRNALIN28A_aspacer RNA sequence
  source 1..19: mol_type = other RNA
cgtgcgcgccagactacgt

SEQ ID NO: 688 - RNA, 19 nt, synthetic construct
  misc_feature 1..19: note = gRNALMX1A_aspacer RNA sequence
  source 1..19: mol_type = other RNA
cctccggctgcagtctcgg

SEQ ID NO: 689 - RNA, 19 nt, synthetic construct
  misc_feature 1..19: note = gRNAMAF_aspacer RNA sequence
  source 1..19: mol_type = other RNA
agaggtgcagcccgactgg

SEQ ID NO: 690 - RNA, 19 nt, synthetic construct
  misc_feature 1..19: note = gRNAMAFF_aspacer RNA sequence
  source 1..19: mol_type = other RNA
cccggttcagagcgacctg

SEQ ID NO: 691 - RNA, 19 nt, synthetic construct
  misc_feature 1..19: note = gRNAMBD3_aspacer RNA sequence
  source 1..19: mol_type = other RNA
agaagtgcccagaaggtcg

SEQ ID NO: 692 - RNA, 19 nt, synthetic construct
  misc_feature 1..19: note = gRNAMBD4_aspacer RNA sequence
  source 1..19: mol_type = other RNA
ccggtgccgtgagctgaag

SEQ ID NO: 693 - RNA, 19 nt, synthetic construct
  misc_feature 1..19: note = gRNAMBNL2_aspacer RNA sequence
  source 1..19: mol_type = other RNA
gaaagccgtctgccgtatc

SEQ ID NO: 694 - RNA, 19 nt, synthetic construct
  misc_feature 1..19: note = gRNAMED1_aspacer RNA sequence
  source 1..19: mol_type = other RNA
aagaagagaagggtgctcg

SEQ ID NO: 695 - RNA, 19 nt, synthetic construct
  misc_feature 1..19: note = gRNAMED14_aspacer RNA sequence
  source 1..19: mol_type = other RNA
ctgcagaggaccttccgac

SEQ ID NO: 696 - RNA, 19 nt, synthetic construct
  misc_feature 1..19: note = gRNAMED23_aspacer RNA sequence
  source 1..19: mol_type = other RNA
aagcgacgccgaggagcta

SEQ ID NO: 697 - RNA, 19 nt, synthetic construct
  misc_feature 1..19: note = gRNAMED24_aspacer RNA sequence
  source 1..19: mol_type = other RNA
tgtgcggtaggcttaaatt

SEQ ID NO: 698 - RNA, 19 nt, synthetic construct
  misc_feature 1..19: note = gRNAMEF2C_aspacer RNA sequence
  source 1..19: mol_type = other RNA
tagcagcccgaagatgtct

SEQ ID NO: 699 - RNA, 19 nt, synthetic construct
  misc_feature 1..19: note = gRNAMEF2D_aspacer RNA sequence
  source 1..19: mol_type = other RNA
cgggagtcgaggccgacgt

SEQ ID NO: 700 - RNA, 19 nt, synthetic construct
  misc_feature 1..19: note = gRNAMEIS3_aspacer RNA sequence
  source 1..19: mol_type = other RNA
caacaccgcgggccgtcag

SEQ ID NO: 701 - RNA, 19 nt, synthetic construct
  misc_feature 1..19: note = gRNAMESP1_aspacer RNA sequence
  source 1..19: mol_type = other RNA
ctggagactctcctcgctg

SEQ ID NO: 702 - RNA, 19 nt, synthetic construct
  misc_feature 1..19: note = gRNAMESP1_bspacer RNA sequence
  source 1..19: mol_type = other RNA
gcctagcacggccgacagg

SEQ ID NO: 703 - RNA, 19 nt, synthetic construct
  misc_feature 1..19: note = gRNAMGA_aspacer RNA sequence
  source 1..19: mol_type = other RNA
gaccacaggggcgcgccaa

SEQ ID NO: 704 - RNA, 19 nt, synthetic construct
  misc_feature 1..19: note = gRNAMITF_aspacer RNA sequence
  source 1..19: mol_type = other RNA
ttggaattatagaaagtag

SEQ ID NO: 705 - RNA, 19 nt, synthetic construct
  misc_feature 1..19: note = gRNAMLX_aspacer RNA sequence
  source 1..19: mol_type = other RNA
ccttgacccaagggtcctc

SEQ ID NO: 706 - RNA, 19 nt, synthetic construct
  misc_feature 1..19: note = gRNAMNX1_aspacer RNA sequence
  source 1..19: mol_type = other RNA
gcgcgggtccccaccacgg

SEQ ID NO: 707 - RNA, 19 nt, synthetic construct
  misc_feature 1..19: note = gRNAMYF5_aspacer RNA sequence
  source 1..19: mol_type = other RNA
ccgatgggcaaatcccggg

SEQ ID NO: 708 - RNA, 19 nt, synthetic construct
  misc_feature 1..19: note = gRNAMYOG_aspacer RNA sequence
  source 1..19: mol_type = other RNA
cggggttcctggtagaagt

SEQ ID NO: 709 - RNA, 19 nt, synthetic construct
  misc_feature 1..19: note = gRNAMYPOP_aspacer RNA sequence
  source 1..19: mol_type = other RNA
ggagccggtgagtgacccg

SEQ ID NO: 710 - RNA, 19 nt, synthetic construct
  misc_feature 1..19: note = gRNAMYRFL_aspacer RNA sequence
  source 1..19: mol_type = other RNA
cttcattatcagaaagtag

SEQ ID NO: 711 - RNA, 19 nt, synthetic construct
  misc_feature 1..19: note = gRNAMYT1L_aspacer RNA sequence
  source 1..19: mol_type = other RNA
gtgcttcaacaagactgca

SEQ ID NO: 712 - RNA, 19 nt, synthetic construct
  misc_feature 1..19: note = gRNANCOR1_aspacer RNA sequence
  source 1..19: mol_type = other RNA
tcccggggcagcagccgct

SEQ ID NO: 713 - RNA, 19 nt, synthetic construct
  misc_feature 1..19: note = gRNANEUROG1_bspacer RNA sequence
  source 1..19: mol_type = other RNA
ctcgtgtgagcaccgagtg

SEQ ID NO: 714 - RNA, 19 nt, synthetic construct
  misc_feature 1..19: note = gRNANFAT5_aspacer RNA sequence
  source 1..19: mol_type = other RNA
gtccccgtcccgccggggg

SEQ ID NO: 715 - RNA, 19 nt, synthetic construct
  misc_feature 1..19: note = gRNANFATC2_aspacer RNA sequence
  source 1..19: mol_type = other RNA
gcgatccggcttactccag

SEQ ID NO: 716 - RNA, 19 nt, synthetic construct
  misc_feature 1..19: note = gRNANFATC2_bspacer RNA sequence
  source 1..19: mol_type = other RNA
agaggctgcgttcagactg

SEQ ID NO: 717 - RNA, 19 nt, synthetic construct
  misc_feature 1..19: note = gRNANFATC3_aspacer RNA sequence
  source 1..19: mol_type = other RNA
gaggcttaggcaccggtgg

SEQ ID NO: 718 - RNA, 19 nt, synthetic construct
  misc_feature 1..19: note = gRNANFE2L1_aspacer RNA sequence
  source 1..19: mol_type = other RNA
ccctggaggctagaagctc

SEQ ID NO: 719 - RNA, 19 nt, synthetic construct
  misc_feature 1..19: note = gRNANFE2L3_aspacer RNA sequence
  source 1..19: mol_type = other RNA
gggtccgcacgtgtcaccc

SEQ ID NO: 720 - RNA, 19 nt, synthetic construct
  misc_feature 1..19: note = gRNANFIA_aspacer RNA sequence
  source 1..19: mol_type = other RNA
tccacgccgcggcttacct

SEQ ID NO: 721 - RNA, 19 nt, synthetic construct
  misc_feature 1..19: note = gRNANFYB_aspacer RNA sequence
  source 1..19: mol_type = other RNA
ccccgggcccggagctcaa

SEQ ID NO: 722 - RNA, 19 nt, synthetic construct
  misc_feature 1..19: note = gRNANKX1-2_aspacer RNA sequence
  source 1..19: mol_type = other RNA
cgggaagccaggaaaagtt

SEQ ID NO: 723 - RNA, 19 nt, synthetic construct
  misc_feature 1..19: note = gRNANKX2-3_aspacer RNA sequence
  source 1..19: mol_type = other RNA
gtctgtcaaaagcccgact

SEQ ID NO: 724 - RNA, 19 nt, synthetic construct
  misc_feature 1..19: note = gRNANKX2-4_aspacer RNA sequence
  source 1..19: mol_type = other RNA
gcctgtgacgaggagtcgg

SEQ ID NO: 725 - RNA, 19 nt, synthetic construct
  misc_feature 1..19: note = gRNANKX2-5_aspacer RNA sequence
  source 1..19: mol_type = other RNA
gccagctctggatgtgtcc

SEQ ID NO: 726 - RNA, 19 nt, synthetic construct
  misc_feature 1..19: note = gRNANOTCH3_aspacer RNA sequence
  source 1..19: mol_type = other RNA
tgggctccgggcgcgtccc

SEQ ID NO: 727 - RNA, 19 nt, synthetic construct
  misc_feature 1..19: note = gRNANOTO_aspacer RNA sequence
  source 1..19: mol_type = other RNA
caggaggttcccagacaac

SEQ ID NO: 728 - RNA, 19 nt, synthetic construct
  misc_feature 1..19: note = gRNANOTO_bspacer RNA sequence
  source 1..19: mol_type = other RNA
cctggggctaggcatgacg

SEQ ID NO: 729 - RNA, 19 nt, synthetic construct
  misc_feature 1..19: note = gRNANR1H2_aspacer RNA sequence
  source 1..19: mol_type = other RNA
gcggggttgccggaagaag

SEQ ID NO: 730 - RNA, 19 nt, synthetic construct
  misc_feature 1..19: note = gRNANR1H4_aspacer RNA sequence
  source 1..19: mol_type = other RNA
aaatcgctgggatctggag

SEQ ID NO: 731 - RNA, 19 nt, synthetic construct
  misc_feature 1..19: note = gRNANR1I2_aspacer RNA sequence
  source 1..19: mol_type = other RNA
aatactcctgtcctgaaca

SEQ ID NO: 732 - RNA, 19 nt, synthetic construct
  misc_feature 1..19: note = gRNANR2C2_3spacer RNA sequence
  source 1..19: mol_type = other RNA
ccgccgcccgcgcgctggt

SEQ ID NO: 733 - RNA, 19 nt, synthetic construct
  misc_feature 1..19: note = gRNANR2F1_aspacer RNA sequence
  source 1..19: mol_type = other RNA
gaatggagtaaaagagaca

SEQ ID NO: 734 - RNA, 19 nt, synthetic construct
  misc_feature 1..19: note = gRNANR5A2_bspacer RNA sequence
  source 1..19: mol_type = other RNA
tccggcgaaaagaaggaag

SEQ ID NO: 735 - RNA, 19 nt, synthetic construct
  misc_feature 1..19: note = gRNAOSR2_aspacer RNA sequence
  source 1..19: mol_type = other RNA
gcccaagactcccggcctg

SEQ ID NO: 736 - RNA, 19 nt, synthetic construct
  misc_feature 1..19: note = gRNAOTX1_aspacer RNA sequence
  source 1..19: mol_type = other RNA
cactcccggtgcaacgtgg

SEQ ID NO: 737 - RNA, 19 nt, synthetic construct
  misc_feature 1..19: note = gRNAOVOL1_aspacer RNA sequence
  source 1..19: mol_type = other RNA
aacagggaaggagtcgcta

SEQ ID NO: 738 - RNA, 19 nt, synthetic construct
  misc_feature 1..19: note = gRNAPA2G4_aspacer RNA sequence
  source 1..19: mol_type = other RNA
cccaggctgaagtctatgg

SEQ ID NO: 739 - RNA, 19 nt, synthetic construct
  misc_feature 1..19: note = gRNAPATZ1_aspacer RNA sequence
  source 1..19: mol_type = other RNA
ctgtggagccagaactggg

SEQ ID NO: 740 - RNA, 19 nt, synthetic construct
  misc_feature 1..19: note = gRNAPAX9_aspacer RNA sequence
  source 1..19: mol_type = other RNA
ctgtcagagccgggaaggg

SEQ ID NO: 741 - RNA, 19 nt, synthetic construct
  misc_feature 1..19: note = gRNAPAX9_aspacer RNA sequence
  source 1..19: mol_type = other RNA
gacacgaccggagccctgc

SEQ ID NO: 742 - RNA, 19 nt, synthetic construct
  misc_feature 1..19: note = gRNAPBX4_aspacer RNA sequence
  source 1..19: mol_type = other RNA
tggaggccagactgacgag

SEQ ID NO: 743 - RNA, 19 nt, synthetic construct
  misc_feature 1..19: note = gRNAPGR_aspacer RNA sequence
  source 1..19: mol_type = other RNA
ccacagctgtcactaatcg

SEQ ID NO: 744 - RNA, 19 nt, synthetic construct
  misc_feature 1..19: note = gRNAPITX1_aspacer RNA sequence
  source 1..19: mol_type = other RNA
agactctgccggcgccgtc

SEQ ID NO: 745 - RNA, 19 nt, synthetic construct
  misc_feature 1..19: note = gRNAPITX3_aspacer RNA sequence
  source 1..19: mol_type = other RNA
caggagcgcccgagcggag

SEQ ID NO: 746 - RNA, 19 nt, synthetic construct
  misc_feature 1..19: note = gRNAPITX3_bspacer RNA sequence
  source 1..19: mol_type = other RNA
tcgggcgctcctggactct

SEQ ID NO: 747 - RNA, 19 nt, synthetic construct
  misc_feature 1..19: note = gRNAPITX3_cspacer RNA sequence
  source 1..19: mol_type = other RNA
gctgcggcggcgatctaga

SEQ ID NO: 748 - RNA, 19 nt, synthetic construct
  misc_feature 1..19: note = gRNAPOU2F2_aspacer RNA sequence
  source 1..19: mol_type = other RNA
atggttcactccagcatgg

SEQ ID NO: 749 - RNA, 19 nt, synthetic construct
  misc_feature 1..19: note = gRNAPOU3F1_aspacer RNA sequence
  source 1..19: mol_type = other RNA
gcccgcagacggagcggag

SEQ ID NO: 750 - RNA, 19 nt, synthetic construct
  misc_feature 1..19: note = gRNAPOU3F2_aspacer RNA sequence
  source 1..19: mol_type = other RNA
agtccggctccgagagtca

SEQ ID NO: 751 - RNA, 19 nt, synthetic construct
  misc_feature 1..19: note = gRNAPOU3F3_bspacer RNA sequence
  source 1..19: mol_type = other RNA
gctgttccccggcaggtag

SEQ ID NO: 752 - RNA, 19 nt, synthetic construct
  misc_feature 1..19: note = gRNAPOU5F1_aspacer RNA sequence
  source 1..19: mol_type = other RNA
aggcaagtgagcttcgacg

SEQ ID NO: 753 - RNA, 19 nt, synthetic construct
  misc_feature 1..19: note = gRNAPRDM1_aspacer RNA sequence
  source 1..19: mol_type = other RNA
gcctctccgcaacactgga

SEQ ID NO: 754 - RNA, 19 nt, synthetic construct
  misc_feature 1..19: note = gRNAPRDM16_bspacer RNA sequence
  source 1..19: mol_type = other RNA
gccgacaccatgcgatcca

SEQ ID NO: 755 - RNA, 19 nt, synthetic construct
  misc_feature 1..19: note = gRNAPRDM7_aspacer RNA sequence
  source 1..19: mol_type = other RNA
gcgaagccagactcccagc

SEQ ID NO: 756 - RNA, 19 nt, synthetic construct
  misc_feature 1..19: note = gRNAPRR12_aspacer RNA sequence
  source 1..19: mol_type = other RNA
tcctcctcctctgcgctca

SEQ ID NO: 757 - RNA, 19 nt, synthetic construct
  misc_feature 1..19: note = gRNAPRRX1_aspacer RNA sequence
  source 1..19: mol_type = other RNA
gcggccgcttggacagccc

SEQ ID NO: 758 - RNA, 19 nt, synthetic construct
  misc_feature 1..19: note = gRNARBCK1_aspacer RNA sequence
  source 1..19: mol_type = other RNA
aggccccagttcttcgcaa

SEQ ID NO: 759 - RNA, 19 nt, synthetic construct
  misc_feature 1..19: note = gRNARHOXF1_aspacer RNA sequence
  source 1..19: mol_type = other RNA
gaagaaaagggccaatagg

SEQ ID NO: 760 - RNA, 19 nt, synthetic construct
  misc_feature 1..19: note = gRNARUNX2_aspacer RNA sequence
  source 1..19: mol_type = other RNA
ctgactctgttggtctcgg

SEQ ID NO: 761 - RNA, 19 nt, synthetic construct
  misc_feature 1..19: note = gRNASALL3_aspacer RNA sequence
  source 1..19: mol_type = other RNA
ggatgcgcgcgtccgggag

SEQ ID NO: 762 - RNA, 19 nt, synthetic construct
  misc_feature 1..19: note = gRNASIM1_aspacer RNA sequence
  source 1..19: mol_type = other RNA
gttcactattattcctaat

SEQ ID NO: 763 - RNA, 19 nt, synthetic construct
  misc_feature 1..19: note = gRNASIX1_aspacer RNA sequence
  source 1..19: mol_type = other RNA
ggcaactagcagcatccac

SEQ ID NO: 764 - RNA, 19 nt, synthetic construct
  misc_feature 1..19: note = gRNASIX6_aspacer RNA sequence
  source 1..19: mol_type = other RNA
gggagcggacgaccccgac

SEQ ID NO: 765 - RNA, 19 nt, synthetic construct
  misc_feature 1..19: note = gRNASKI_aspacer RNA sequence
  source 1..19: mol_type = other RNA
tggatgtggcgccgggccc

SEQ ID NO: 766 - RNA, 19 nt, synthetic construct
  misc_feature 1..19: note = gRNASKIL_aspacer RNA sequence
  source 1..19: mol_type = other RNA
tcgctaggcgggtgttcca

SEQ ID NO: 767 - RNA, 19 nt, synthetic construct
  misc_feature 1..19: note = gRNASKOR1_aspacer RNA sequence
  source 1..19: mol_type = other RNA
cgccatgcgctccaggctt

SEQ ID NO: 768 - RNA, 19 nt, synthetic construct
  misc_feature 1..19: note = gRNASMAD2_aspacer RNA sequence
  source 1..19: mol_type = other RNA
ggaccccccggatctgacg

SEQ ID NO: 769 - RNA, 19 nt, synthetic construct
  misc_feature 1..19: note = gRNASMAD5_aspacer RNA sequence
  source 1..19: mol_type = other RNA
cgcgggcgaggggaactgg

SEQ ID NO: 770 - RNA, 19 nt, synthetic construct
  misc_feature 1..19: note = gRNASMYD3_aspacer RNA sequence
  source 1..19: mol_type = other RNA
tacgcacccgagaaggcag

SEQ ID NO: 771 - RNA, 19 nt, synthetic construct
  misc_feature 1..19: note = gRNASNAPC2_aspacer RNA sequence
  source 1..19: mol_type = other RNA
gcgcctgcctctttctgag

SEQ ID NO: 772 - RNA, 19 nt, synthetic construct
  misc_feature 1..19: note = gRNASOX1_aspacer RNA sequence
  source 1..19: mol_type = other RNA
gagcatagacggccggggt

SEQ ID NO: 773 - RNA, 19 nt, synthetic construct
  misc_feature 1..19: note = gRNASOX14_aspacer RNA sequence
  source 1..19: mol_type = other RNA
cgaggggagcgcagaaccc

SEQ ID NO: 774 - RNA, 19 nt, synthetic construct
  misc_feature 1..19: note = gRNASOX30_aspacer RNA sequence
  source 1..19: mol_type = other RNA
catccgccgtggtgagacc

SEQ ID NO: 775 - RNA, 19 nt, synthetic construct
  misc_feature 1..19: note = gRNASOX5_aspacer RNA sequence
  source 1..19: mol_type = other RNA
ggtcgcttggaagacatcc

SEQ ID NO: 776 - RNA, 19 nt, synthetic construct
  misc_feature 1..19: note = gRNASOX6_aspacer RNA sequence
  source 1..19: mol_type = other RNA
aatggagaggtggcttgct

SEQ ID NO: 777 - RNA, 19 nt, synthetic construct
  misc_feature 1..19: note = gRNASP2_aspacer RNA sequence
  source 1..19: mol_type = other RNA
aggaagatgtcgtaatgag

SEQ ID NO: 778 - RNA, 19 nt, synthetic construct
  misc_feature 1..19: note = gRNASP3_aspacer RNA sequence
  source 1..19: mol_type = other RNA
tagcggccagcagagcgag

SEQ ID NO: 779 - RNA, 19 nt, synthetic construct
  misc_feature 1..19: note = gRNASP5_aspacer RNA sequence
  source 1..19: mol_type = other RNA
gcgcggcgaggggcaaggg

SEQ ID NO: 780 - RNA, 19 nt, synthetic construct
  misc_feature 1..19: note = gRNASP8_aspacer RNA sequence
  source 1..19: mol_type = other RNA
aaaaagatcctctgagagg

SEQ ID NO: 781 - RNA, 19 nt, synthetic construct
  misc_feature 1..19: note = gRNASP9_aspacer RNA sequence
  source 1..19: mol_type = other RNA
ctatggccacgtctatact

SEQ ID NO: 782 - RNA, 19 nt, synthetic construct
  misc_feature 1..19: note = gRNASPIB_1spacer RNA sequence
  source 1..19: mol_type = other RNA
gaggctgcacagtaagtga

SEQ ID NO: 783 - RNA, 19 nt, synthetic construct
  misc_feature 1..19: note = gRNASTAT5B_aspacer RNA sequence
  source 1..19: mol_type = other RNA
gcggcgcggccctgacggg

SEQ ID NO: 784 - RNA, 19 nt, synthetic construct
  misc_feature 1..19: note = gRNAT_aspacer RNA sequence
  source 1..19: mol_type = other RNA
ccggcgtcgggtgtccccg

SEQ ID NO: 785 - RNA, 19 nt, synthetic construct
  misc_feature 1..19: note = gRNATBPL1_aspacer RNA sequence
  source 1..19: mol_type = other RNA
tattgtcgcggggaagctg

SEQ ID NO: 786 - RNA, 19 nt, synthetic construct
  misc_feature 1..19: note = gRNATBX5_aspacer RNA sequence
  source 1..19: mol_type = other RNA
gtacctcccagctcaaggt

SEQ ID NO: 787 - RNA, 19 nt, synthetic construct
  misc_feature 1..19: note = gRNATBX6_aspacer RNA sequence
  source 1..19: mol_type = other RNA
tcgcgccagggtttcccga

SEQ ID NO: 788 - RNA, 19 nt, synthetic construct
  misc_feature 1..19: note = gRNATCF12_aspacer RNA sequence
  source 1..19: mol_type = other RNA
ccccccgaatagaacttgt

SEQ ID NO: 789 - RNA, 19 nt, synthetic construct
  misc_feature 1..19: note = gRNATCF23_aspacer RNA sequence
  source 1..19: mol_type = other RNA
aggacaaggcaggacccgt

SEQ ID NO: 790 - RNA, 19 nt, synthetic construct
  misc_feature 1..19: note = gRNATCF3_aspacer RNA sequence
  source 1..19: mol_type = other RNA
tagcgggccggagccgacg

SEQ ID NO: 791 - RNA, 19 nt, synthetic construct
  misc_feature 1..19: note = gRNATFAP2A_aspacer RNA sequence
  source 1..19: mol_type = other RNA
ccgccgctaagaaaagagg

SEQ ID NO: 792 - RNA, 19 nt, synthetic construct
  misc_feature 1..19: note = gRNATFAP2A_bspacer RNA sequence
  source 1..19: mol_type = other RNA
ccagagagtagctccactt

SEQ ID NO: 793 - RNA, 19 nt, synthetic construct
  misc_feature 1..19: note = gRNATFAP2E_aspacer RNA sequence
  source 1..19: mol_type = other RNA
ccatggaggcaggacggac

SEQ ID NO: 794 - RNA, 19 nt, synthetic construct
  misc_feature 1..19: note = gRNATFDP2_aspacer RNA sequence
  source 1..19: mol_type = other RNA
agtctttgttaccattcag

SEQ ID NO: 795 - RNA, 19 nt, synthetic construct
  misc_feature 1..19: note = gRNATFDP3_aspacer RNA sequence
  source 1..19: mol_type = other RNA
ggtgtgaacggccacgggg

SEQ ID NO: 796 - RNA, 19 nt, synthetic construct
  misc_feature 1..19: note = gRNATGIF2_aspacer RNA sequence
  source 1..19: mol_type = other RNA
tccctgtcggagagatcgg

SEQ ID NO: 797 - RNA, 19 nt, synthetic construct
  misc_feature 1..19: note = gRNATGIF2LX_aspacer RNA sequence
  source 1..19: mol_type = other RNA
atatggaggccgctgcgga

SEQ ID NO: 798 - RNA, 19 nt, synthetic construct
  misc_feature 1..19: note = gRNATHAP6_aspacer RNA sequence
  source 1..19: mol_type = other RNA
caggctccccgccaccgga

SEQ ID NO: 799 - RNA, 19 nt, synthetic construct
  misc_feature 1..19: note = gRNATHRA_aspacer RNA sequence
  source 1..19: mol_type = other RNA
tgctgggggcgtccatggg

SEQ ID NO: 800 - RNA, 19 nt, synthetic construct
  misc_feature 1..19: note = gRNATIGD1_aspacer RNA sequence
  source 1..19: mol_type = other RNA
cgggcgggtcacaaggacc

SEQ ID NO: 801 - RNA, 19 nt, synthetic construct
  misc_feature 1..19: note = gRNATIGD3_aspacer RNA sequence
  source 1..19: mol_type = other RNA
ggcggcgacagcagaacag

SEQ ID NO: 802 - RNA, 19 nt, synthetic construct
  misc_feature 1..19: note = gRNATIGD5_aspacer RNA sequence
  source 1..19: mol_type = other RNA
ccatcgagcgcgtcaaggg

SEQ ID NO: 803 - RNA, 19 nt, synthetic construct
  misc_feature 1..19: note = gRNATLX3_aspacer RNA sequence
  source 1..19: mol_type = other RNA
ccgacggcgccagctacct

SEQ ID NO: 804 - RNA, 19 nt, synthetic construct
  misc_feature 1..19: note = gRNATOX_aspacer RNA sequence
  source 1..19: mol_type = other RNA
cggaacagagtgaggtgtc

SEQ ID NO: 805 - RNA, 19 nt, synthetic construct
  misc_feature 1..19: note = gRNATOX2_aspacer RNA sequence
  source 1..19: mol_type = other RNA
cgcgggcgccgaggggtac

SEQ ID NO: 806 - RNA, 19 nt, synthetic construct
  misc_feature 1..19: note = gRNATRIM27_aspacer RNA sequence
  source 1..19: mol_type = other RNA
gctctcgcttagggggcac

SEQ ID NO: 807 - RNA, 19 nt, synthetic construct
  misc_feature 1..19: note = gRNATRIM27_aspacer RNA sequence
  source 1..19: mol_type = other RNA
aggctcgcggccacgctag

SEQ ID NO: 808 - RNA, 19 nt, synthetic construct
  misc_feature 1..19: note = gRNATRIM40_aspacer RNA sequence
  source 1..19: mol_type = other RNA
aatttcagatcatcttctc

SEQ ID NO: 809 - RNA, 19 nt, synthetic construct
  misc_feature 1..19: note = gRNATRIM52_aspacer RNA sequence
  source 1..19: mol_type = other RNA
tagccagcggctgcatctg

SEQ ID NO: 810 - RNA, 19 nt, synthetic construct
  misc_feature 1..19: note = gRNATSHZ2_aspacer RNA sequence
  source 1..19: mol_type = other RNA
acacacacaagacagggcg

SEQ ID NO: 811 - RNA, 19 nt, synthetic construct
  misc_feature 1..19: note = gRNAVAX1_aspacer RNA sequence
  source 1..19: mol_type = other RNA
tgtccccagcctggcgatc

SEQ ID NO: 812 - RNA, 19 nt, synthetic construct
  misc_feature 1..19: note = gRNAVEGFA_aspacer RNA sequence
  source 1..19: mol_type = other RNA
ccgggtagctcggaggtcg

SEQ ID NO: 813 - RNA, 19 nt, synthetic construct
  misc_feature 1..19: note = gRNAVSX1_aspacer RNA sequence
  source 1..19: mol_type = other RNA
atagcatgggatcatgctc

SEQ ID NO: 814 - RNA, 19 nt, synthetic construct
  misc_feature 1..19: note = gRNAVSX1_bspacer RNA sequence
  source 1..19: mol_type = other RNA
cagcgtgatggccgagtac

SEQ ID NO: 815 - RNA, 19 nt, synthetic construct
  misc_feature 1..19: note = gRNAWNT1_aspacer RNA sequence
  source 1..19: mol_type = other RNA
gctcgcggtcccggctggt

SEQ ID NO: 816 - RNA, 19 nt, synthetic construct
  misc_feature 1..19: note = gRNAWNT3A_aspacer RNA sequence
  source 1..19: mol_type = other RNA
gctcactcaccaccagatc

SEQ ID NO: 817 - RNA, 19 nt, synthetic construct
  misc_feature 1..19: note = gRNAYBX1_aspacer RNA sequence
  source 1..19: mol_type = other RNA
tcgaactagcgagaatggc

SEQ ID NO: 818 - RNA, 19 nt, synthetic construct
  misc_feature 1..19: note = gRNAYY1_aspacer RNA sequence
  source 1..19: mol_type = other RNA
gcggctgcagagcgatcat

SEQ ID NO: 819 - RNA, 19 nt, synthetic construct
  misc_feature 1..19: note = gRNAYY2_aspacer RNA sequence
  source 1..19: mol_type = other RNA
agagaaaggcgcgagactg

SEQ ID NO: 820 - RNA, 19 nt, synthetic construct
  misc_feature 1..19: note = gRNAYY2_bspacer RNA sequence
  source 1..19: mol_type = other RNA
aggaaggggcgagctgcag

SEQ ID NO: 821 - RNA, 19 nt, synthetic construct
  misc_feature 1..19: note = gRNAZBED5_aspacer RNA sequence
  source 1..19: mol_type = other RNA
cagctcagggatatcgcct

SEQ ID NO: 822 - RNA, 19 nt, synthetic construct
  misc_feature 1..19: note = gRNAZBED5_bspacer RNA sequence
  source 1..19: mol_type = other RNA
atctctatggagatggcct

SEQ ID NO: 823 - RNA, 19 nt, synthetic construct
  misc_feature 1..19: note = gRNAZBTB2_aspacer RNA sequence
  source 1..19: mol_type = other RNA
gtgtggaggaggcgcctct

SEQ ID NO: 824 - RNA, 19 nt, synthetic construct
  misc_feature 1..19: note = gRNAZBTB21_aspacer RNA sequence
  source 1..19: mol_type = other RNA
gatggaatcacagcggcag

SEQ ID NO: 825 - RNA, 19 nt, synthetic construct
  misc_feature 1..19: note = gRNAZBTB38_aspacer RNA sequence
  source 1..19: mol_type = other RNA
cacgggtccggaagcacca

SEQ ID NO: 826 - RNA, 19 nt, synthetic construct
  misc_feature 1..19: note = gRNAZBTB4_aspacer RNA sequence
  source 1..19: mol_type = other RNA
cgcctgcgcaggcccgcaa

SEQ ID NO: 827 - RNA, 19 nt, synthetic construct
  misc_feature 1..19: note = gRNAZBTB40_aspacer RNA sequence
  source 1..19: mol_type = other RNA
cgccggagacgccagaagg

SEQ ID NO: 828 - RNA, 19 nt, synthetic construct
  misc_feature 1..19: note = gRNAZBTB42_aspacer RNA sequence
  source 1..19: mol_type = other RNA
gccgggaagggcgcttcgt

SEQ ID NO: 829 - RNA, 19 nt, synthetic construct
  misc_feature 1..19: note = gRNAZBTB49_aspacer RNA sequence
  source 1..19: mol_type = other RNA
tctgtgccgggcatcacag

SEQ ID NO: 830 - RNA, 19 nt, synthetic construct
  misc_feature 1..19: note = gRNAZBTB7B_aspacer RNA sequence
  source 1..19: mol_type = other RNA
gcggccttctgaccaggac

SEQ ID NO: 831 - RNA, 19 nt, synthetic construct
  misc_feature 1..19: note = gRNAZBTB7B_bspacer RNA sequence
  source 1..19: mol_type = other RNA
agcagggccccaagccccc

SEQ ID NO: 832 - RNA, 19 nt, synthetic construct
  misc_feature 1..19: note = gRNAZBTB7C_cspacer RNA sequence
  source 1..19: mol_type = other RNA
cgccacgagactctgacag

SEQ ID NO: 833 - RNA, 19 nt, synthetic construct
  misc_feature 1..19: note = gRNAZBTB8B_aspacer RNA sequence
  source 1..19: mol_type = other RNA
gtcggtgcgcggtgctccg

SEQ ID NO: 834 - RNA, 19 nt, synthetic construct
  misc_feature 1..19: note = gRNAZBTB9_aspacer RNA sequence
  source 1..19: mol_type = other RNA
gtcggcgggaaggacaatc

SEQ ID NO: 835 - RNA, 19 nt, synthetic construct
  misc_feature 1..19: note = gRNAZC3H8_aspacer RNA sequence
  source 1..19: mol_type = other RNA
acccgagagagtgacaacc

SEQ ID NO: 836 - RNA, 19 nt, synthetic construct
  misc_feature 1..19: note = gRNAZEB2_aspacer RNA sequence
  source 1..19: mol_type = other RNA
cctcgccaagagtgtcggg

SEQ ID NO: 837 - RNA, 19 nt, synthetic construct
  misc_feature 1..19: note = gRNAZFHX2_aspacer RNA sequence
  source 1..19: mol_type = other RNA
ctctacctaaagctgaact

SEQ ID NO: 838 - RNA, 19 nt, synthetic construct
  misc_feature 1..19: note = gRNAZFHX3_aspacer RNA sequence
  source 1..19: mol_type = other RNA
tgccgccgagcagcatggt

SEQ ID NO: 839 - RNA, 19 nt, synthetic construct
  misc_feature 1..19: note = gRNAZFP28_aspacer RNA sequence
  source 1..19: mol_type = other RNA
gcctcgggtgacatgcggg

SEQ ID NO: 840 - RNA, 19 nt, synthetic construct
  misc_feature 1..19: note = gRNAZFP41_aspacer RNA sequence
  source 1..19: mol_type = other RNA
ccggtgcctagggccgacg

SEQ ID NO: 841 - RNA, 19 nt, synthetic construct
  misc_feature 1..19: note = gRNAZFP69B_aspacer RNA sequence
  source 1..19: mol_type = other RNA
ctgcagcggtgggaaggcg

SEQ ID NO: 842 - RNA, 19 nt, synthetic construct
  misc_feature 1..19: note = gRNAZFP90_aspacer RNA sequence
  source 1..19: mol_type = other RNA
gcaaggcgcgaaacccacc

SEQ ID NO: 843 - RNA, 19 nt, synthetic construct
  misc_feature 1..19: note = gRNAZGLP1_aspacer RNA sequence
  source 1..19: mol_type = other RNA
taaaggccccacctagctc

SEQ ID NO: 844 - RNA, 19 nt, synthetic construct
  misc_feature 1..19: note = gRNAZHX3_aspacer RNA sequence
  source 1..19: mol_type = other RNA
ggagccgcggactgctgag

SEQ ID NO: 845 - RNA, 19 nt, synthetic construct
  misc_feature 1..19: note = gRNAZIC5_aspacer RNA sequence
  source 1..19: mol_type = other RNA
gctacaccaccaccaacag

SEQ ID NO: 846 - RNA, 19 nt, synthetic construct
  misc_feature 1..19: note = gRNA ZKSCAN1_a spacer RNA sequence
  source 1..19: mol_type = other RNA
gagggcctaagtccgtgtg

SEQ ID NO: 847 - RNA, 19 nt, synthetic construct
  misc_feature 1..19: note = gRNA ZKSCAN1_b spacer RNA sequence
  source 1..19: mol_type = other RNA
ggccgaagggcaccgcaca

SEQ ID NO: 848 - RNA, 19 nt, synthetic construct
  misc_feature 1..19: note = gRNA ZKSCAN2_a spacer RNA sequence
  source 1..19: mol_type = other RNA
cagggctcgcagggggcag

SEQ ID NO: 849 - RNA, 19 nt, synthetic construct
  misc_feature 1..19: note = gRNA ZKSCAN7_a spacer RNA sequence
  source 1..19: mol_type = other RNA
ccgcgtctcggcccactcg

SEQ ID NO: 850 - RNA, 19 nt, synthetic construct
  misc_feature 1..19: note = gRNA ZNF107_a spacer RNA sequence
  source 1..19: mol_type = other RNA
agccacagccacttccgat

SEQ ID NO: 851 - RNA, 19 nt, synthetic construct
  misc_feature 1..19: note = gRNA ZNF121_a spacer RNA sequence
  source 1..19: mol_type = other RNA
tcccagtcaggagccaggt

SEQ ID NO: 852 - RNA, 19 nt, synthetic construct
  misc_feature 1..19: note = gRNA ZNF132_a spacer RNA sequence
  source 1..19: mol_type = other RNA
agcaaaatgaggaccgcaa

SEQ ID NO: 853 - RNA, 19 nt, synthetic construct
  misc_feature 1..19: note = gRNA ZNF135_a spacer RNA sequence
  source 1..19: mol_type = other RNA
ctttgtctcgcagtcagga

SEQ ID NO: 854 - RNA, 19 nt, synthetic construct
  misc_feature 1..19: note = gRNA ZNF135_b spacer RNA sequence
  source 1..19: mol_type = other RNA
agggtgagctaggccggcg

SEQ ID NO: 855 - RNA, 19 nt, synthetic construct
  misc_feature 1..19: note = gRNA ZNF140_a spacer RNA sequence
  source 1..19: mol_type = other RNA
cgttgcctacagccaacac

SEQ ID NO: 856 - RNA, 19 nt, synthetic construct
  misc_feature 1..19: note = gRNA ZNF141_a spacer RNA sequence
  source 1..19: mol_type = other RNA
agctgtggccgaatcacca

SEQ ID NO: 857 - RNA, 19 nt, synthetic construct
  misc_feature 1..19: note = gRNA ZNF222_a spacer RNA sequence
  source 1..19: mol_type = other RNA
ggttgcgagccccaaggaa

SEQ ID NO: 858 - RNA, 19 nt, synthetic construct
  misc_feature 1..19: note = gRNA ZNF225_a spacer RNA sequence
  source 1..19: mol_type = other RNA
caacctcacagtaacggag

SEQ ID NO: 859 - RNA, 19 nt, synthetic construct
  misc_feature 1..19: note = gRNA ZNF229_a spacer RNA sequence
  source 1..19: mol_type = other RNA
aggccatgggaattaggat

SEQ ID NO: 860 - RNA, 19 nt, synthetic construct
  misc_feature 1..19: note = gRNA ZNF230_a spacer RNA sequence
  source 1..19: mol_type = other RNA
tcgttgcgaccccaagcga

SEQ ID NO: 861 - RNA, 19 nt, synthetic construct
  misc_feature 1..19: note = gRNA ZNF248_a spacer RNA sequence
  source 1..19: mol_type = other RNA
tgcaggagccgtctccctc

SEQ ID NO: 862 - RNA, 19 nt, synthetic construct
  misc_feature 1..19: note = gRNA ZNF25_a spacer RNA sequence
  source 1..19: mol_type = other RNA
accaggcggctcccaccca

SEQ ID NO: 863 - RNA, 19 nt, synthetic construct
  misc_feature 1..19: note = gRNA ZNF26_a spacer RNA sequence
  source 1..19: mol_type = other RNA
acacccgctggccagattc

SEQ ID NO: 864 - RNA, 19 nt, synthetic construct
  misc_feature 1..19: note = gRNA ZNF267_a spacer RNA sequence
  source 1..19: mol_type = other RNA
tacatcacctcaaataaaa

SEQ ID NO: 865 - RNA, 19 nt, synthetic construct
  misc_feature 1..19: note = gRNA ZNF280C_a spacer RNA sequence
  source 1..19: mol_type = other RNA
tggggttcggataaggagg

SEQ ID NO: 866 - RNA, 19 nt, synthetic construct
  misc_feature 1..19: note = gRNA ZNF281_a spacer RNA sequence
  source 1..19: mol_type = other RNA
gacccgtaagtattgccgg

SEQ ID NO: 867 - RNA, 19 nt, synthetic construct
  misc_feature 1..19: note = gRNA ZNF283_a spacer RNA sequence
  source 1..19: mol_type = other RNA
accttaaggacaccggaaa

SEQ ID NO: 868 - RNA, 19 nt, synthetic construct
  misc_feature 1..19: note = gRNA ZNF286B_a spacer RNA sequence
  source 1..19: mol_type = other RNA
gtgctgctctcattccgcc

SEQ ID NO: 869 - RNA, 19 nt, synthetic construct
  misc_feature 1..19: note = gRNA ZNF304_a spacer RNA sequence
  source 1..19: mol_type = other RNA
caaccagaatgcacggacc

SEQ ID NO: 870 - RNA, 19 nt, synthetic construct
  misc_feature 1..19: note = gRNA ZNF317_a spacer RNA sequence
  source 1..19: mol_type = other RNA
atcgggggagcggaggtga

SEQ ID NO: 871 - RNA, 19 nt, synthetic construct
  misc_feature 1..19: note = gRNA ZNF317_b spacer RNA sequence
  source 1..19: mol_type = other RNA
gacacgaggggtccccaac

SEQ ID NO: 872 - RNA, 19 nt, synthetic construct
  misc_feature 1..19: note = gRNA ZNF318_a spacer RNA sequence
  source 1..19: mol_type = other RNA
cacggcgacagctctgacc

SEQ ID NO: 873 - RNA, 19 nt, synthetic construct
  misc_feature 1..19: note = gRNA ZNF320_a spacer RNA sequence
  source 1..19: mol_type = other RNA
agccgccgagagcgacggt

SEQ ID NO: 874 - RNA, 19 nt, synthetic construct
  misc_feature 1..19: note = gRNA ZNF33B_a spacer RNA sequence
  source 1..19: mol_type = other RNA
aggaactggcgtagcgtcc

SEQ ID NO: 875 - RNA, 19 nt, synthetic construct
  misc_feature 1..19: note = gRNA ZNF346_a spacer RNA sequence
  source 1..19: mol_type = other RNA
caggccgcggacggcggag

SEQ ID NO: 876 - RNA, 19 nt, synthetic construct
  misc_feature 1..19: note = gRNA ZNF358_a spacer RNA sequence
  source 1..19: mol_type = other RNA
cgctcccggggagcgagag

SEQ ID NO: 877 - RNA, 19 nt, synthetic construct
  misc_feature 1..19: note = gRNA ZNF367_a spacer RNA sequence
  source 1..19: mol_type = other RNA
tgtaacgcgggaaaagccg

SEQ ID NO: 878 - RNA, 19 nt, synthetic construct
  misc_feature 1..19: note = gRNA ZNF382_a spacer RNA sequence
  source 1..19: mol_type = other RNA
cacggacgcagccacagaa

SEQ ID NO: 879 - RNA, 19 nt, synthetic construct
  misc_feature 1..19: note = gRNA ZNF383_a spacer RNA sequence
  source 1..19: mol_type = other RNA
caagggtaggggaagtgcg

SEQ ID NO: 880 - RNA, 19 nt, synthetic construct
  misc_feature 1..19: note = gRNA ZNF385B_a spacer RNA sequence
  source 1..19: mol_type = other RNA
cggcgcgcgagagtggcgt

SEQ ID NO: 881 - RNA, 19 nt, synthetic construct
  misc_feature 1..19: note = gRNA ZNF385B_b spacer RNA sequence
  source 1..19: mol_type = other RNA
gcccggcgcgggcaagagt

SEQ ID NO: 882 - RNA, 19 nt, synthetic construct
  misc_feature 1..19: note = gRNA ZNF391_a spacer RNA sequence
  source 1..19: mol_type = other RNA
cccgcccggggtgtgtcgg

SEQ ID NO: 883 - RNA, 19 nt, synthetic construct
  misc_feature 1..19: note = gRNA ZNF415_a spacer RNA sequence
  source 1..19: mol_type = other RNA
aacggatcgcgttgggtga

SEQ ID NO: 884 - RNA, 19 nt, synthetic construct
  misc_feature 1..19: note = gRNA ZNF423_a spacer RNA sequence
  source 1..19: mol_type = other RNA
ccttgcctggggaggatga

SEQ ID NO: 885 - RNA, 19 nt, synthetic construct
  misc_feature 1..19: note = gRNA ZNF43_a spacer RNA sequence
  source 1..19: mol_type = other RNA
ctccggcacgcgcagattg

SEQ ID NO: 886 - RNA, 19 nt, synthetic construct
  misc_feature 1..19: note = gRNA ZNF43_b spacer RNA sequence
  source 1..19: mol_type = other RNA
cagctctgcagccgcaacg

SEQ ID NO: 887 - RNA, 19 nt, synthetic construct
  misc_feature 1..19: note = gRNA ZNF432_a spacer RNA sequence
  source 1..19: mol_type = other RNA
cagggcgtggaaacgtggt

SEQ ID NO: 888 - RNA, 19 nt, synthetic construct
  misc_feature 1..19: note = gRNA ZNF433_a spacer RNA sequence
  source 1..19: mol_type = other RNA
caggcggcgagctgaggtt

SEQ ID NO: 889 - RNA, 19 nt, synthetic construct
  misc_feature 1..19: note = gRNA ZNF436_a spacer RNA sequence
  source 1..19: mol_type = other RNA
tcagaaaccacaggctcat

SEQ ID NO: 890 - RNA, 19 nt, synthetic construct
  misc_feature 1..19: note = gRNA ZNF441_a spacer RNA sequence
  source 1..19: mol_type = other RNA
aatcaggcgcactgaccgg

SEQ ID NO: 891 - RNA, 19 nt, synthetic construct
  misc_feature 1..19: note = gRNA ZNF441_b spacer RNA sequence
  source 1..19: mol_type = other RNA
cgtgcggccgagggaaccg

SEQ ID NO: 892 - RNA, 19 nt, synthetic construct
  misc_feature 1..19: note = gRNA ZNF443_a spacer RNA sequence
  source 1..19: mol_type = other RNA
ggagctgtcggtaggacct

SEQ ID NO: 893 - RNA, 19 nt, synthetic construct
  misc_feature 1..19: note = gRNA ZNF461_a spacer RNA sequence
  source 1..19: mol_type = other RNA
aggaatggtctccgggtag

SEQ ID NO: 894 - RNA, 19 nt, synthetic construct
  misc_feature 1..19: note = gRNA ZNF462_a spacer RNA sequence
  source 1..19: mol_type = other RNA
tgccgggtctcagcaatgg

SEQ ID NO: 895 - RNA, 19 nt, synthetic construct
  misc_feature 1..19: note = gRNA ZNF468_a spacer RNA sequence
  source 1..19: mol_type = other RNA
aaacgtatacattgcccta

SEQ ID NO: 896 - RNA, 19 nt, synthetic construct
  misc_feature 1..19: note = gRNA ZNF473_a spacer RNA sequence
  source 1..19: mol_type = other RNA
ctgcgaggaggcgcgtgtg

SEQ ID NO: 897 - RNA, 19 nt, synthetic construct
  misc_feature 1..19: note = gRNA ZNF483_a spacer RNA sequence
  source 1..19: mol_type = other RNA
cggatgctgatgcaggtac

SEQ ID NO: 898 - RNA, 19 nt, synthetic construct
  misc_feature 1..19: note = gRNA ZNF486_a spacer RNA sequence
  source 1..19: mol_type = other RNA
tcgctgcatctggagctct

SEQ ID NO: 899 - RNA, 19 nt, synthetic construct
  misc_feature 1..19: note = gRNA ZNF491_a spacer RNA sequence
  source 1..19: mol_type = other RNA
gactggatgcagaacgcaa

SEQ ID NO: 900 - RNA, 19 nt, synthetic construct
  misc_feature 1..19: note = gRNA ZNF507_a spacer RNA sequence
  source 1..19: mol_type = other RNA
tggagctccggatgaggag

SEQ ID NO: 901 - RNA, 19 nt, synthetic construct
  misc_feature 1..19: note = gRNA ZNF514_a spacer RNA sequence
  source 1..19: mol_type = other RNA
agaggcaggcagtacttca

SEQ ID NO: 902 - RNA, 19 nt, synthetic construct
  misc_feature 1..19: note = gRNA ZNF519_a spacer RNA sequence
  source 1..19: mol_type = other RNA
cacagagcgacggagtgag

SEQ ID NO: 903 - RNA, 19 nt, synthetic construct
  misc_feature 1..19: note = gRNA ZNF519_b spacer RNA sequence
  source 1..19: mol_type = other RNA
cagccagagcgcggggtta

SEQ ID NO: 904 - RNA, 19 nt, synthetic construct
  misc_feature 1..19: note = gRNA ZNF540_a spacer RNA sequence
  source 1..19: mol_type = other RNA
acgggccctagcggcttgg

SEQ ID NO: 905 - RNA, 19 nt, synthetic construct
  misc_feature 1..19: note = gRNA ZNF543_a spacer RNA sequence
  source 1..19: mol_type = other RNA
gctggacgcgcctacccag

SEQ ID NO: 906 - RNA, 19 nt, synthetic construct
  misc_feature 1..19: note = gRNA ZNF546_a spacer RNA sequence
  source 1..19: mol_type = other RNA
gcaatgtaaagggcccttg

SEQ ID NO: 907 - RNA, 19 nt, synthetic construct
  misc_feature 1..19: note = gRNA ZNF549_a spacer RNA sequence
  source 1..19: mol_type = other RNA
gccggaaacgcccagcccg

SEQ ID NO: 908 - RNA, 19 nt, synthetic construct
  misc_feature 1..19: note = gRNA ZNF555_a spacer RNA sequence
  source 1..19: mol_type = other RNA
gccagggaccgctaggggc

SEQ ID NO: 909 - RNA, 19 nt, synthetic construct
  misc_feature 1..19: note = gRNA ZNF562_a spacer RNA sequence
  source 1..19: mol_type = other RNA
caccacaataaaggttaaa

SEQ ID NO: 910 - RNA, 19 nt, synthetic construct
  misc_feature 1..19: note = gRNA ZNF567_a spacer RNA sequence
  source 1..19: mol_type = other RNA
cggccggcaaccgaaggtg

SEQ ID NO: 911 - RNA, 19 nt, synthetic construct
  misc_feature 1..19: note = gRNA ZNF569_a spacer RNA sequence
  source 1..19: mol_type = other RNA
gtctcggtccgttacacca

SEQ ID NO: 912 - RNA, 19 nt, synthetic construct
  misc_feature 1..19: note = gRNA ZNF574_a spacer RNA sequence
  source 1..19: mol_type = other RNA
actgaggtagtgactgagg

SEQ ID NO: 913 - RNA, 19 nt, synthetic construct
  misc_feature 1..19: note = gRNA ZNF577_a spacer RNA sequence
  source 1..19: mol_type = other RNA
gcagtgtgtggggttcgcg

SEQ ID NO: 914 - RNA, 19 nt, synthetic construct
  misc_feature 1..19: note = gRNA ZNF596_a spacer RNA sequence
  source 1..19: mol_type = other RNA
ccgcaggaagggaactgcg

SEQ ID NO: 915 - RNA, 19 nt, synthetic construct
  misc_feature 1..19: note = gRNA ZNF610_a spacer RNA sequence
  source 1..19: mol_type = other RNA
aagcgcggggcaggacgtt

SEQ ID NO: 916 - RNA, 19 nt, synthetic construct
  misc_feature 1..19: note = gRNA ZNF616_a spacer RNA sequence
  source 1..19: mol_type = other RNA
cccctccaggcgtcgacaa

SEQ ID NO: 917 - RNA, 19 nt, synthetic construct
  misc_feature 1..19: note = gRNA ZNF621_a spacer RNA sequence
  source 1..19: mol_type = other RNA
cacggtccgggtgaaggag

SEQ ID NO: 918 - RNA, 19 nt, synthetic construct
  misc_feature 1..19: note = gRNA ZNF626_a spacer RNA sequence
  source 1..19: mol_type = other RNA
tgggagagacgccacgctg

SEQ ID NO: 919 - RNA, 19 nt, synthetic construct
  misc_feature 1..19: note = gRNA ZNF627_a spacer RNA sequence
  source 1..19: mol_type = other RNA
acgcgagcccgggtgggga

SEQ ID NO: 920 - RNA, 19 nt, synthetic construct
  misc_feature 1..19: note = gRNA ZNF629_a spacer RNA sequence
  source 1..19: mol_type = other RNA
cttctcaaggggtgattcc

SEQ ID NO: 921 - RNA, 19 nt, synthetic construct
  misc_feature 1..19: note = gRNA ZNF630_a spacer RNA sequence
  source 1..19: mol_type = other RNA
cactcacccggacaagtcg

SEQ ID NO: 922 - RNA, 19 nt, synthetic construct
  misc_feature 1..19: note = gRNA ZNF630_a spacer RNA sequence
  source 1..19: mol_type = other RNA
atcctacgaaagcagtgtg

SEQ ID NO: 923 - RNA, 19 nt, synthetic construct
  misc_feature 1..19: note = gRNA ZNF641_a spacer RNA sequence
  source 1..19: mol_type = other RNA
cggcggagccagcgacagg

SEQ ID NO: 924 - RNA, 19 nt, synthetic construct
  misc_feature 1..19: note = gRNA ZNF645_a spacer RNA sequence
  source 1..19: mol_type = other RNA
cacattcttgttcaccagc

SEQ ID NO: 925 - RNA, 19 nt, synthetic construct
  misc_feature 1..19: note = gRNA ZNF658_a spacer RNA sequence
  source 1..19: mol_type = other RNA
accaaagaggtcgttgtga

SEQ ID NO: 926 - RNA, 19 nt, synthetic construct
  misc_feature 1..19: note = gRNA ZNF660_a spacer RNA sequence
  source 1..19: mol_type = other RNA
gctacgaggagtcagagac

SEQ ID NO: 927 - RNA, 19 nt, synthetic construct
  misc_feature 1..19: note = gRNA ZNF662_a spacer RNA sequence
  source 1..19: mol_type = other RNA
tggagtcggggtcttactc

SEQ ID NO: 928 - RNA, 19 nt, synthetic construct
  misc_feature 1..19: note = gRNA ZNF677_a spacer RNA sequence
  source 1..19: mol_type = other RNA
gcgagatccgcttccgggt

SEQ ID NO: 929 - RNA, 19 nt, synthetic construct
  misc_feature 1..19: note = gRNA ZNF682_a spacer RNA sequence
  source 1..19: mol_type = other RNA
gactccagtccgcagactc

SEQ ID NO: 930 - RNA, 19 nt, synthetic construct
  misc_feature 1..19: note = gRNA ZNF697_a spacer RNA sequence
  source 1..19: mol_type = other RNA
gccccaggggagcggacaa

SEQ ID NO: 931 - RNA, 19 nt, synthetic construct
  misc_feature 1..19: note = gRNA ZNF703_a spacer RNA sequence
  source 1..19: mol_type = other RNA
tgctagccggggccagcgg

SEQ ID NO: 932 - RNA, 19 nt, synthetic construct
  misc_feature 1..19: note = gRNA ZNF705A_a spacer RNA sequence
  source 1..19: mol_type = other RNA
tgagtatattcaggaggat

SEQ ID NO: 933 - RNA, 19 nt, synthetic construct
  misc_feature 1..19: note = gRNA ZNF705B_a spacer RNA sequence
  source 1..19: mol_type = other RNA
tagccccagttggccctac

SEQ ID NO: 934 - RNA, 19 nt, synthetic construct
  misc_feature 1..19: note = gRNA ZNF705G_a spacer RNA sequence
  source 1..19: mol_type = other RNA
ttggaacacccaggcaggg

SEQ ID NO: 935 - RNA, 19 nt, synthetic construct
  misc_feature 1..19: note = gRNA ZNF716_a spacer RNA sequence
  source 1..19: mol_type = other RNA
ggacgcttccgtaaggtta

SEQ ID NO: 936 - RNA, 19 nt, synthetic construct
  misc_feature 1..19: note = gRNA ZNF729_a spacer RNA sequence
  source 1..19: mol_type = other RNA
cgagatgggaaagaactcc

SEQ ID NO: 937 - RNA, 19 nt, synthetic construct
  misc_feature 1..19: note = gRNA ZNF750_a spacer RNA sequence
  source 1..19: mol_type = other RNA
tgggctccgaggattactc

SEQ ID NO: 938 - RNA, 19 nt, synthetic construct
  misc_feature 1..19: note = gRNA ZNF75A_a spacer RNA sequence
  source 1..19: mol_type = other RNA
ctggctctgtacctggaca

SEQ ID NO: 939 - RNA, 19 nt, synthetic construct
  misc_feature 1..19: note = gRNA ZNF765_a spacer RNA sequence
  source 1..19: mol_type = other RNA
actgggaggcgctcaggga

SEQ ID NO: 940 - RNA, 19 nt, synthetic construct
  misc_feature 1..19: note = gRNA ZNF771_a spacer RNA sequence
  source 1..19: mol_type = other RNA
tcggcgacctggagctctg

SEQ ID NO: 941 - RNA, 19 nt, synthetic construct
  misc_feature 1..19: note = gRNA ZNF773_a spacer RNA sequence
  source 1..19: mol_type = other RNA
ggaagctggttgttcgctg

SEQ ID NO: 942 - RNA, 19 nt, synthetic construct
  misc_feature 1..19: note = gRNA ZNF773_b spacer RNA sequence
  source 1..19: mol_type = other RNA
gcaagctgagttctcttga

SEQ ID NO: 943 - RNA, 19 nt, synthetic construct
  misc_feature 1..19: note = gRNA ZNF773_c spacer RNA sequence
  source 1..19: mol_type = other RNA
tcgctgcggcgaccagctc

SEQ ID NO: 944 - RNA, 19 nt, synthetic construct
  misc_feature 1..19: note = gRNA ZNF774_a spacer RNA sequence
  source 1..19: mol_type = other RNA
ggcacagcctcggggttgc

SEQ ID NO: 945 - RNA, 19 nt, synthetic construct
  misc_feature 1..19: note = gRNA ZNF778_a spacer RNA sequence
  source 1..19: mol_type = other RNA
gacagcccgaggacacgcg

SEQ ID NO: 946 - RNA, 19 nt, synthetic construct
  misc_feature 1..19: note = gRNA ZNF778_b spacer RNA sequence
  source 1..19: mol_type = other RNA
tcccggaccagcttccccg

SEQ ID NO: 947 - RNA, 19 nt, synthetic construct
  misc_feature 1..19: note = gRNA ZNF784_a spacer RNA sequence
  source 1..19: mol_type = other RNA
gctcctgggatcgcgactc

SEQ ID NO: 948 - RNA, 19 nt, synthetic construct
  misc_feature 1..19: note = gRNA ZNF789_a spacer RNA sequence
  source 1..19: mol_type = other RNA
ggaacagacacaaccactc

SEQ ID NO: 949 - RNA, 19 nt, synthetic construct
  misc_feature 1..19: note = gRNA ZNF804B_a spacer RNA sequence
  source 1..19: mol_type = other RNA
cgaggtggctgctcaaccg

SEQ ID NO: 950 - RNA, 19 nt, synthetic construct
  misc_feature 1..19: note = gRNA ZNF816_a spacer RNA sequence
  source 1..19: mol_type = other RNA
gagcagattcgcacaaacc

SEQ ID NO: 951 - RNA, 19 nt, synthetic construct
  misc_feature 1..19: note = gRNA ZNF823_a spacer RNA sequence
  source 1..19: mol_type = other RNA
tcccctgggccgcaagatg

SEQ ID NO: 952 - RNA, 19 nt, synthetic construct
  misc_feature 1..19: note = gRNA ZNF83_a spacer RNA sequence
  source 1..19: mol_type = other RNA
tgaggacgatagaacgatt

SEQ ID NO: 953 - RNA, 19 nt, synthetic construct
  misc_feature 1..19: note = gRNA ZNF83_b spacer RNA sequence
  source 1..19: mol_type = other RNA
cttcatgctacacagtcca

SEQ ID NO: 954 - RNA, 19 nt, synthetic construct
  misc_feature 1..19: note = gRNA ZNF831_a spacer RNA sequence
  source 1..19: mol_type = other RNA
cccgcgccccgctagtgac

SEQ ID NO: 955 - RNA, 19 nt, synthetic construct
  misc_feature 1..19: note = gRNA ZNF846_a spacer RNA sequence
  source 1..19: mol_type = other RNA
gacgctccggacttctgct

SEQ ID NO: 956 - RNA, 19 nt, synthetic construct
  misc_feature 1..19: note = gRNA ZNF852_a spacer RNA sequence
  source 1..19: mol_type = other RNA
cgtttggatgattgtctct

SEQ ID NO: 957 - RNA, 19 nt, synthetic construct
  misc_feature 1..19: note = gRNA ZNF879_a spacer RNA sequence
  source 1..19: mol_type = other RNA
acaccgcacaagaggcgag

SEQ ID NO: 958 - RNA, 19 nt, synthetic construct
  misc_feature 1..19: note = gRNA ZNF91_a spacer RNA sequence
  source 1..19: mol_type = other RNA
cgctgccgccggagtttcc

SEQ ID NO: 959 - RNA, 19 nt, synthetic construct
  misc_feature 1..19: note = gRNA ZNF93_a spacer RNA sequence
  source 1..19: mol_type = other RNA
aacagggcggcttctggtt

SEQ ID NO: 960 - RNA, 19 nt, synthetic construct
  misc_feature 1..19: note = gRNA ZNF99_a spacer RNA sequence
  source 1..19: mol_type = other RNA
cacagggccacagaggcta

SEQ ID NO: 961 - RNA, 19 nt, synthetic construct
  misc_feature 1..19: note = gRNA ZNF99_a spacer RNA sequence
  source 1..19: mol_type = other RNA
tagtcacagtgcaggaagg

SEQ ID NO: 962 - RNA, 19 nt, synthetic construct
  misc_feature 1..19: note = gRNA ZSCAN16_a spacer RNA sequence
  source 1..19: mol_type = other RNA
cagccttccgggagaggat

SEQ ID NO: 963 - RNA, 19 nt, synthetic construct
  misc_feature 1..19: note = gRNA ZSCAN2_a spacer RNA sequence
  source 1..19: mol_type = other RNA
cctctccggctcacctctc

SEQ ID NO: 964 - RNA, 19 nt, synthetic construct
  misc_feature 1..19: note = gRNA ZSCAN21_a spacer RNA sequence
  source 1..19: mol_type = other RNA
tcagagccgctccgggtac

SEQ ID NO: 965 - RNA, 19 nt, synthetic construct
  misc_feature 1..19: note = gRNA ZSCAN5A_a spacer RNA sequence
  source 1..19: mol_type = other RNA
taactttctcatcaagctt

SEQ ID NO: 966 - RNA, 19 nt, synthetic construct
  misc_feature 1..19: note = gRNA ZSCAN5A_b spacer RNA sequence
  source 1..19: mol_type = other RNA
tccgcgtcgaggccctacg

SEQ ID NO: 967 - RNA, 19 nt, synthetic construct
  misc_feature 1..19: note = gRNA ZSCAN5B_a spacer RNA sequence
  source 1..19: mol_type = other RNA
attcatgtgccaagtctca

SEQ ID NO: 968 - RNA, 19 nt, synthetic construct
  misc_feature 1..19: note = gRNA ZSCAN5B_bs pacer RNA sequence
  source 1..19: mol_type = other RNA
ggtgagtgtccagcggcga

SEQ ID NO: 969 - RNA, 105 nt, synthetic construct
  misc_feature 1..105: note = gRNABMP4_a
  source 1..105: mol_type = other RNA
gacagccggcgagcagggggtttaagagctatgctggaaacagcatagcaagtttaaataaggctagtccgttatcaacttgaaaaagtggcaccgagtcggtgc

SEQ ID NO: 970 - RNA, 105 nt, synthetic construct
  misc_feature 1..105: note = gRNAE2F7_a
  source 1..105: mol_type = other RNA
ttagcggggactacgatccgtttaagagctatgctggaaacagcatagcaagtttaaataaggctagtccgttatcaacttgaaaaagtggcaccgagtcggtgc

SEQ ID NO: 971 - RNA, 105 nt, synthetic construct
  misc_feature 1..105: note = gRNAESRRG_a
  source 1..105: mol_type = other RNA
tggagcccgccgcctccaggtttaagagctatgctggaaacagcatagcaagtttaaataaggctagtccgttatcaacttgaaaaagtggcaccgagtcggtgc

SEQ ID NO: 972 - RNA, 105 nt, synthetic construct
  misc_feature 1..105: note = gRNALYL1_a
  source 1..105: mol_type = other RNA
gtttcctccctctcaccccgtttaagagctatgctggaaacagcatagcaagtttaaataaggctagtccgttatcaacttgaaaaagtggcaccgagtcggtgc

SEQ ID NO: 973 - RNA, 105 nt, synthetic construct
  misc_feature 1..105: note = gRNASTAT5A_a
  source 1..105: mol_type = other RNA
ccgcggtccagggataggtgtttaagagctatgctggaaacagcatagcaagtttaaataaggctagtccgttatcaacttgaaaaagtggcaccgagtcggtgc

SEQ ID NO: 974 - RNA, 105 nt, synthetic construct
  misc_feature 1..105: note = gRNATHAP10_a
  source 1..105: mol_type = other RNA
cttccggtgaccagaggtagtttaagagctatgctggaaacagcatagcaagtttaaataaggctagtccgttatcaacttgaaaaagtggcaccgagtcggtgc

SEQ ID NO: 975 - RNA, 105 nt, synthetic construct
  misc_feature 1..105: note = gRNAZNF362_a
  source 1..105: mol_type = other RNA
gggtaggaagtgtctcccggtttaagagctatgctggaaacagcatagcaagtttaaataaggctagtccgttatcaacttgaaaaagtggcaccgagtcggtgc

SEQ ID NO: 976 - RNA, 105 nt, synthetic construct
  misc_feature 1..105: note = gRNAZSCAN1_a
  source 1..105: mol_type = other RNA
ccgcgcgcgggcttcgctcgtttaagagctatgctggaaacagcatagcaagtttaaataaggctagtccgttatcaacttgaaaaagtggcaccgagtcggtgc

SEQ ID NO: 977 - RNA, 105 nt, synthetic construct
  misc_feature 1..105: note = gRNAANHX_a
  source 1..105: mol_type = other RNA
cggaaggtgaggggcgctagtttaagagctatgctggaaacagcatagcaagtttaaataaggctagtccgttatcaacttgaaaaagtggcaccgagtcggtgc

SEQ ID NO: 978 - RNA, 105 nt, synthetic construct
  misc_feature 1..105: note = gRNACPEB1_a
  source 1..105: mol_type = other RNA
caacatcgtcttccatgtcgtttaagagctatgctggaaacagcatagcaagtttaaataaggctagtccgttatcaacttgaaaaagtggcaccgagtcggtgc

SEQ ID NO: 979 - RNA, 105 nt, synthetic construct
  misc_feature 1..105: note = gRNACSRNP1_a
  source 1..105: mol_type = other RNA
tctgcgcgtccggcagcgggtttaagagctatgctggaaacagcatagcaagtttaaataaggctagtccgttatcaacttgaaaaagtggcaccgagtcggtgc

SEQ ID NO: 980 - RNA, 105 nt, synthetic construct
  misc_feature 1..105: note = gRNAEN2_a
  source 1..105: mol_type = other RNA
ctccgtgtgcgccgcgggagtttaagagctatgctggaaacagcatagcaagtttaaataaggctagtccgttatcaacttgaaaaagtggcaccgagtcggtgc

SEQ ID NO: 981 - RNA, 105 nt, synthetic construct
  misc_feature 1..105: note = gRNAEPAS1_a
  source 1..105: mol_type = other RNA
cgccccagcgctcctgagggtttaagagctatgctggaaacagcatagcaagtttaaataaggctagtccgttatcaacttgaaaaagtggcaccgagtcggtgc

SEQ ID NO: 982 - RNA, 105 nt, synthetic construct
  misc_feature 1..105: note = gRNAIRX3_a
  source 1..105: mol_type = other RNA
aagcagcggaagcgatcctgtttaagagctatgctggaaacagcatagcaagtttaaataaggctagtccgttatcaacttgaaaaagtggcaccgagtcggtgc

SEQ ID NO: 983 - RNA, 105 nt, synthetic construct
  misc_feature 1..105: note = gRNALHX8_a
  source 1..105: mol_type = other RNA
cgagctaccagcgctcggggtttaagagctatgctggaaacagcatagcaagtttaaataaggctagtccgttatcaacttgaaaaagtggcaccgagtcggtgc

SEQ ID NO: 984 - RNA, 105 nt, synthetic construct
  misc_feature 1..105: note = gRNANR5A2_a
  source 1..105: mol_type = other RNA
agcatgacaaggcgaccgcgtttaagagctatgctggaaacagcatagcaagtttaaataaggctagtccgttatcaacttgaaaaagtggcaccgagtcggtgc

SEQ ID NO: 985 - RNA, 105 nt, synthetic construct
  misc_feature 1..105: note = gRNAPRDM16_a
  source 1..105: mol_type = other RNA
accatgcgatccaaggcgagtttaagagctatgctggaaacagcatagcaagtttaaataaggctagtccgttatcaacttgaaaaagtggcaccgagtcggtgc

SEQ ID NO: 986 - RNA, 105 nt, synthetic construct
  misc_feature 1..105: note = gRNARAX2_a
  source 1..105: mol_type = other RNA
ccggagccgagccaggtcggtttaagagctatgctggaaacagcatagcaagtttaaataaggctagtccgttatcaacttgaaaaagtggcaccgagtcggtgc

SEQ ID NO: 987 - RNA, 105 nt, synthetic construct
  misc_feature 1..105: note = gRNASCML4_a
  source 1..105: mol_type = other RNA
tgtgagctactaacacggggtttaagagctatgctggaaacagcatagcaagtttaaataaggctagtccgttatcaacttgaaaaagtggcaccgagtcggtgc

SEQ ID NO: 988 - RNA, 105 nt, synthetic construct
  misc_feature 1..105: note = gRNASMAD1_a
  source 1..105: mol_type = other RNA
gctcctccgagcagacggggtttaagagctatgctggaaacagcatagcaagtttaaataaggctagtccgttatcaacttgaaaaagtggcaccgagtcggtgc

SEQ ID NO: 989 - RNA, 105 nt, synthetic construct
  misc_feature 1..105: note = gRNASOX6_a
  source 1..105: mol_type = other RNA
tctagccagcccctaagtcgtttaagagctatgctggaaacagcatagcaagtttaaataaggctagtccgttatcaacttgaaaaagtggcaccgagtcggtgc

SEQ ID NO: 990 - RNA, 105 nt, synthetic construct
  misc_feature 1..105: note = gRNASUV39H1_a
  source 1..105: mol_type = other RNA
tcttctcgcgaggccggctgtttaagagctatgctggaaacagcatagcaagtttaaataaggctagtccgttatcaacttgaaaaagtggcaccgagtcggtgc

SEQ ID NO: 991 - RNA, 105 nt, synthetic construct
  misc_feature 1..105: note = gRNATFDP1_a
  source 1..105: mol_type = other RNA
tcccggcgccactcggcccgtttaagagctatgctggaaacagcatagcaagtttaaataaggctagtccgttatcaacttgaaaaagtggcaccgagtcggtgc

SEQ ID NO: 992 - RNA, 105 nt, synthetic construct
  misc_feature 1..105: note = gRNAZNF287_a
  source 1..105: mol_type = other RNA
cagaggcgccggggtttctgtttaagagctatgctggaaacagcatagcaagtttaaataaggctagtccgttatcaacttgaaaaagtggcaccgagtcggtgc

SEQ ID NO: 993 - RNA, 105 nt, synthetic construct
  misc_feature 1..105: note = gRNAZNF438_a
  source 1..105: mol_type = other RNA
gtcacgggcccagcagtcggtttaagagctatgctggaaacagcatagcaagtttaaataaggctagtccgttatcaacttgaaaaagtggcaccgagtcggtgc

SEQ ID NO: 994 - RNA, 105 nt, synthetic construct
  misc_feature 1..105: note = gRNAZNF681_a
  source 1..105: mol_type = other RNA
aggagaaaggacgcccggggtttaagagctatgctggaaacagcatagcaagtttaaataaggctagtccgttatcaacttgaaaaagtggcaccgagtcggtgc

SEQ ID NO: 995 - RNA, 105 nt, synthetic construct
  misc_feature 1..105: note = gRNAZNF853_a
  source 1..105: mol_type = other RNA
cctctgcgctagggaggtggtttaagagctatgctggaaacagcatagcaagtttaaataaggctagtccgttatcaacttgaaaaagtggcaccgagtcggtgc

SEQ ID NO: 996 - RNA, 105 nt, synthetic construct
  misc_feature 1..105: note = gRNABMP4_b
  source 1..105: mol_type = other RNA
gaggaaggaagatgcgagagtttaagagctatgctggaaacagcatagcaagtttaaataaggctagtccgttatcaacttgaaaaagtggcaccgagtcggtgc

SEQ ID NO: 997 - RNA, 105 nt, synthetic construct
  misc_feature 1..105: note = gRNACARF_a
  source 1..105: mol_type = other RNA
tcccaaccagaggctcactgtttaagagctatgctggaaacagcatagcaagtttaaataaggctagtccgttatcaacttgaaaaagtggcaccgagtcggtgc

SEQ ID NO: 998 - RNA, 105 nt, synthetic construct
  misc_feature 1..105: note = gRNAESRRG_b
  source 1..105: mol_type = other RNA
tcttcagctataccaagaggtttaagagctatgctggaaacagcatagcaagtttaaataaggctagtccgttatcaacttgaaaaagtggcaccgagtcggtgc

SEQ ID NO: 999 - RNA, 105 nt, synthetic construct
  misc_feature 1..105: note = gRNAESRRG_c
  source 1..105: mol_type = other RNA
tgtgttgtagtgatcatgtgtttaagagctatgctggaaacagcatagcaagtttaaataaggctagtccgttatcaacttgaaaaagtggcaccgagtcggtgc

SEQ ID NO: 1000 - RNA, 105 nt, synthetic construct
  misc_feature 1..105: note = gRNAFOXR2_a
  source 1..105: mol_type = other RNA
atctagggagcttatcagtgtttaagagctatgctggaaacagcatagcaagtttaaataaggctagtccgttatcaacttgaaaaagtggcaccgagtcggtgc

SEQ ID NO: 1001 - RNA, 105 nt, synthetic construct
  misc_feature 1..105: note = gRNAHOXA7_a
  source 1..105: mol_type = other RNA
gccgtagccggacgcaaaggtttaagagctatgctggaaacagcatagcaagtttaaataaggctagtccgttatcaacttgaaaaagtggcaccgagtcggtgc

SEQ ID NO: 1002 - RNA, 105 nt, synthetic construct
  misc_feature 1..105: note = gRNAIRF9_a
  source 1..105: mol_type = other RNA
ggtaagatcagccaaggatgtttaagagctatgctggaaacagcatagcaagtttaaataaggctagtccgttatcaacttgaaaaagtggcaccgagtcggtgc

SEQ ID NO: 1003 - RNA, 105 nt, synthetic construct
  misc_feature 1..105: note = gRNAKAT5_a
  source 1..105: mol_type = other RNA
gaagtgacgtctcccagaggtttaagagctatgctggaaacagcatagcaagtttaaataaggctagtccgttatcaacttgaaaaagtggcaccgagtcggtgc

SEQ ID NO: 1004 - RNA, 105 nt, synthetic construct
  misc_feature 1..105: note = gRNAKLF5_a
  source 1..105: mol_type = other RNA
agagcctgagagcacggtggtttaagagctatgctggaaacagcatagcaagtttaaataaggctagtccgttatcaacttgaaaaagtggcaccgagtcggtgc

SEQ ID NO: 1005 - RNA, 105 nt, synthetic construct
  misc_feature 1..105: note = gRNANEUROD1_a
  source 1..105: mol_type = other RNA
caggacctactaacaacaagtttaagagctatgctggaaacagcatagcaagtttaaataaggctagtccgttatcaacttgaaaaagtggcaccgagtcggtgc

SEQ ID NO: 1006 - RNA, 105 nt, synthetic construct
  misc_feature 1..105: note = gRNAPAX6_a
  source 1..105: mol_type = other RNA
atgttgcggagtgattagtgtttaagagctatgctggaaacagcatagcaagtttaaataaggctagtccgttatcaacttgaaaaagtggcaccgagtcggtgc

SEQ ID NO: 1007 - RNA, 105 nt, synthetic construct
  misc_feature 1..105: note = gRNAPIN1_a
  source 1..105: mol_type = other RNA
tgcgcttctcccagccggggtttaagagctatgctggaaacagcatagcaagtttaaataaggctagtccgttatcaacttgaaaaagtggcaccgagtcggtgc

SEQ ID NO: 1008 - RNA, 105 nt, synthetic construct
  misc_feature 1..105: note = gRNAPURG_a
  source 1..105: mol_type = other RNA
ggtgtccgaagtcaggcgggtttaagagctatgctggaaacagcatagcaagtttaaataaggctagtccgttatcaacttgaaaaagtggcaccgagtcggtgc

SEQ ID NO: 1009 - RNA, 105 nt, synthetic construct
  misc_feature 1..105: note = gRNAPURG_b
  source 1..105: mol_type = other RNA
tggtcgtgaagggcatcgggtttaagagctatgctggaaacagcatagcaagtttaaataaggctagtccgttatcaacttgaaaaagtggcaccgagtcggtgc

SEQ ID NO: 1010 - RNA, 105 nt, synthetic construct
  misc_feature 1..105: note = gRNARARA_a
  source 1..105: mol_type = other RNA
catagcgagtcacgtgcgggtttaagagctatgctggaaacagcatagcaagtttaaataaggctagtccgttatcaacttgaaaaagtggcaccgagtcggtgc

SEQ ID NO: 1011 - RNA, 105 nt, synthetic construct
  misc_feature 1..105: note = gRNASNAPC5_a
  source 1..105: mol_type = other RNA
tgccgggccgacagcagccgtttaagagctatgctggaaacagcatagcaagtttaaataaggctagtccgttatcaacttgaaaaagtggcaccgagtcggtgc

SEQ ID NO: 1012 - RNA, 105 nt, synthetic construct
  misc_feature 1..105: note = gRNASTAT5A_ b
  source 1..105: mol_type = other RNA
cctcataagtaactaggctgtttaagagctatgctggaaacagcatagcaagtttaaataaggctagtccgttatcaacttgaaaaagtggcaccgagtcggtgc

SEQ ID NO: 1013 - RNA, 105 nt, synthetic construct
  misc_feature 1..105: note = gRNATBX22_a
  source 1..105: mol_type = other RNA
ttagtgggacatcagtacagtttaagagctatgctggaaacagcatagcaagtttaaataaggctagtccgttatcaacttgaaaaagtggcaccgagtcggtgc

SEQ ID NO: 1014 - RNA, 105 nt, synthetic construct
  misc_feature 1..105: note = gRNAWT1_a
  source 1..105: mol_type = other RNA
caaggcagcgcccacacccgtttaagagctatgctggaaacagcatagcaagtttaaataaggctagtccgttatcaacttgaaaaagtggcaccgagtcggtgc

SEQ ID NO: 1015 - RNA, 105 nt, synthetic construct
  misc_feature 1..105: note = gRNAZNF138_a
  source 1..105: mol_type = other RNA
tgcgtcctcttactcctaggtttaagagctatgctggaaacagcatagcaagtttaaataaggctagtccgttatcaacttgaaaaagtggcaccgagtcggtgc

SEQ ID NO: 1016 - RNA, 105 nt, synthetic construct
  misc_feature 1..105: note = gRNAZNF143_a
  source 1..105: mol_type = other RNA
tgtcctggtgcatggtggtgtttaagagctatgctggaaacagcatagcaagtttaaataaggctagtccgttatcaacttgaaaaagtggcaccgagtcggtgc

SEQ ID NO: 1017 - RNA, 105 nt, synthetic construct
  misc_feature 1..105: note = gRNAZNF205_a
  source 1..105: mol_type = other RNA
ctccacagcctgcacgggggtttaagagctatgctggaaacagcatagcaagtttaaataaggctagtccgttatcaacttgaaaaagtggcaccgagtcggtgc

SEQ ID NO: 1018 - RNA, 105 nt, synthetic construct
  misc_feature 1..105: note = gRNAZNF235_a
  source 1..105: mol_type = other RNA
agagggctcggagaagtctgtttaagagctatgctggaaacagcatagcaagtttaaataaggctagtccgttatcaacttgaaaaagtggcaccgagtcggtgc

SEQ ID NO: 1019 - RNA, 105 nt, synthetic construct
  misc_feature 1..105: note = gRNAZNF526_a
  source 1..105: mol_type = other RNA
gattggtcgccacgggtaagtttaagagctatgctggaaacagcatagcaagtttaaataaggctagtccgttatcaacttgaaaaagtggcaccgagtcggtgc

SEQ ID NO: 1020 - RNA, 105 nt, synthetic construct
  misc_feature 1..105: note = gRNAZNF548_a
  source 1..105: mol_type = other RNA
agcactgggaggaccggtcgtttaagagctatgctggaaacagcatagcaagtttaaataaggctagtccgttatcaacttgaaaaagtggcaccgagtcggtgc

SEQ ID NO: 1021 - RNA, 105 nt, synthetic construct
  misc_feature 1..105: note = gRNAZNF559_a
  source 1..105: mol_type = other RNA
ctgtcctcaggggtcgagggtttaagagctatgctggaaacagcatagcaagtttaaataaggctagtccgttatcaacttgaaaaagtggcaccgagtcggtgc

SEQ ID NO: 1022 - RNA, 105 nt, synthetic construct
  misc_feature 1..105: note = gRNAZNF611_a
  source 1..105: mol_type = other RNA
tgcgctaactaggttcccagtttaagagctatgctggaaacagcatagcaagtttaaataaggctagtccgttatcaacttgaaaaagtggcaccgagtcggtgc

SEQ ID NO: 1023 - RNA, 105 nt, synthetic construct
  misc_feature 1..105: note = gRNAZNF655_a
  source 1..105: mol_type = other RNA
ccgcgaggtgaatgaaccagtttaagagctatgctggaaacagcatagcaagtttaaataaggctagtccgttatcaacttgaaaaagtggcaccgagtcggtgc

SEQ ID NO: 1024 - RNA, 105 nt, synthetic construct
  misc_feature 1..105: note = gRNAZNF672_a
  source 1..105: mol_type = other RNA
caccggttgctgggaagacgtttaagagctatgctggaaacagcatagcaagtttaaataaggctagtccgttatcaacttgaaaaagtggcaccgagtcggtgc

SEQ ID NO: 1025 - RNA, 105 nt, synthetic construct
  misc_feature 1..105: note = gRNAZNF699_a
  source 1..105: mol_type = other RNA
cggacaaggagtggcgggggtttaagagctatgctggaaacagcatagcaagtttaaataaggctagtccgttatcaacttgaaaaagtggcaccgagtcggtgc

SEQ ID NO: 1026 - RNA, 105 nt, synthetic construct
  misc_feature 1..105: note = gRNAZNF706_a
  source 1..105: mol_type = other RNA
cactctggcagctgaccgggtttaagagctatgctggaaacagcatagcaagtttaaataaggctagtccgttatcaacttgaaaaagtggcaccgagtcggtgc

SEQ ID NO: 1027 - RNA, 105 nt, synthetic construct
  misc_feature 1..105: note = gRNAZNF714_a
  source 1..105: mol_type = other RNA
ctgacctggagtcctctcagtttaagagctatgctggaaacagcatagcaagtttaaataaggctagtccgttatcaacttgaaaaagtggcaccgagtcggtgc

SEQ ID NO: 1028 - RNA, 105 nt, synthetic construct
  misc_feature 1..105: note = gRNAZNF772_a
  source 1..105: mol_type = other RNA
tagtccacaggcctgatgggtttaagagctatgctggaaacagcatagcaagtttaaataaggctagtccgttatcaacttgaaaaagtggcaccgagtcggtgc

SEQ ID NO: 1029 - RNA, 105 nt, synthetic construct
  misc_feature 1..105: note = gRNAZNF782_a
  source 1..105: mol_type = other RNA
gggtcggctcggaaagtaggtttaagagctatgctggaaacagcatagcaagtttaaataaggctagtccgttatcaacttgaaaaagtggcaccgagtcggtgc

SEQ ID NO: 1030 - RNA, 105 nt, synthetic construct
  misc_feature 1..105: note = gRNAZSCAN1_a
  source 1..105: mol_type = other RNA
tcgccgtaggggagggaaggtttaagagctatgctggaaacagcatagcaagtttaaataaggctagtccgttatcaacttgaaaaagtggcaccgagtcggtgc

SEQ ID NO: 1031 - RNA, 105 nt, synthetic construct
  misc_feature 1..105: note = gRNAZSCAN26_a
  source 1..105: mol_type = other RNA
tccttctgcgatgcctaaggtttaagagctatgctggaaacagcatagcaagtttaaataaggctagtccgttatcaacttgaaaaagtggcaccgagtcggtgc

SEQ ID NO: 1032 - RNA, 105 nt, synthetic construct
  misc_feature 1..105: note = gRNAADNP_a
  source 1..105: mol_type = other RNA
tgtctgctgaggggagacggtttaagagctatgctggaaacagcatagcaagtttaaataaggctagtccgttatcaacttgaaaaagtggcaccgagtcggtgc

SEQ ID NO: 1033 - RNA, 105 nt, synthetic construct
  misc_feature 1..105: note = gRNAAHRR_a
  source 1..105: mol_type = other RNA
gccagggcgcgctgccccggtttaagagctatgctggaaacagcatagcaagtttaaataaggctagtccgttatcaacttgaaaaagtggcaccgagtcggtgc

SEQ ID NO: 1034 - RNA, 105 nt, synthetic construct
  misc_feature 1..105: note = gRNAAKNA_a
  source 1..105: mol_type = other RNA
ccaggaaaccacccgcgctgtttaagagctatgctggaaacagcatagcaagtttaaataaggctagtccgttatcaacttgaaaaagtggcaccgagtcggtgc

SEQ ID NO: 1035 - RNA, 105 nt, synthetic construct
  misc_feature 1..105: note = gRNAALX3_a
  source 1..105: mol_type = other RNA
cctgcacccggcccctatggtttaagagctatgctggaaacagcatagcaagtttaaataaggctagtccgttatcaacttgaaaaagtggcaccgagtcggtgc

SEQ ID NO: 1036 - RNA, 105 nt, synthetic construct
  misc_feature 1..105: note = gRNAALX4_a
  source 1..105: mol_type = other RNA
tgcgacaccgggctgtagtgtttaagagctatgctggaaacagcatagcaagtttaaataaggctagtccgttatcaacttgaaaaagtggcaccgagtcggtgc

SEQ ID NO: 1037 - RNA, 105 nt, synthetic construct
  misc_feature 1..105: note = gRNAANHX_b
  source 1..105: mol_type = other RNA
aagcgggtcccggagggtggtttaagagctatgctggaaacagcatagcaagtttaaataaggctagtccgttatcaacttgaaaaagtggcaccgagtcggtgc

SEQ ID NO: 1038 - RNA, 105 nt, synthetic construct
  misc_feature 1..105: note = gRNAAR_a
  source 1..105: mol_type = other RNA
gcttgctgggagagcgggagtttaagagctatgctggaaacagcatagcaagtttaaataaggctagtccgttatcaacttgaaaaagtggcaccgagtcggtgc

SEQ ID NO: 1039 - RNA, 105 nt, synthetic construct
  misc_feature 1..105: note = gRNAARHGAP35_a
  source 1..105: mol_type = other RNA
cagtgtggtgggattatctgtttaagagctatgctggaaacagcatagcaagtttaaataaggctagtccgttatcaacttgaaaaagtggcaccgagtcggtgc

SEQ ID NO: 1040 - RNA, 105 nt, synthetic construct
  misc_feature 1..105: note = gRNAARID3C_a
  source 1..105: mol_type = other RNA
agaggtatcaggcagagacgtttaagagctatgctggaaacagcatagcaagtttaaataaggctagtccgttatcaacttgaaaaagtggcaccgagtcggtgc

SEQ ID NO: 1041 - RNA, 105 nt, synthetic construct
  misc_feature 1..105: note = gRNAARID5B_a
  source 1..105: mol_type = other RNA
agaaagaggagcagcgcccgtttaagagctatgctggaaacagcatagcaagtttaaataaggctagtccgttatcaacttgaaaaagtggcaccgagtcggtgc

SEQ ID NO: 1042 - RNA, 105 nt, synthetic construct
  misc_feature 1..105: note = gRNAASCL5_a
  source 1..105: mol_type = other RNA
tggctcccggtgctgtggcgtttaagagctatgctggaaacagcatagcaagtttaaataaggctagtccgttatcaacttgaaaaagtggcaccgagtcggtgc

SEQ ID NO: 1043 - RNA, 105 nt, synthetic construct
  misc_feature 1..105: note = gRNAATF6B_a
  source 1..105: mol_type = other RNA
ggccttgggaaccgtctccgtttaagagctatgctggaaacagcatagcaagtttaaataaggctagtccgttatcaacttgaaaaagtggcaccgagtcggtgc

SEQ ID NO: 1044 - RNA, 105 nt, synthetic construct
  misc_feature 1..105: note = gRNAATOH7_a
  source 1..105: mol_type = other RNA
cttcctgcaaaggagtctcgtttaagagctatgctggaaacagcatagcaagtttaaataaggctagtccgttatcaacttgaaaaagtggcaccgagtcggtgc

SEQ ID NO: 1045 - RNA, 105 nt, synthetic construct
  misc_feature 1..105: note = gRNABARHL1_a
  source 1..105: mol_type = other RNA
tctaatgcgcagaggaggtgtttaagagctatgctggaaacagcatagcaagtttaaataaggctagtccgttatcaacttgaaaaagtggcaccgagtcggtgc

SEQ ID NO: 1046 - RNA, 105 nt, synthetic construct
  misc_feature 1..105: note = gRNABARHL2_a
  source 1..105: mol_type = other RNA
tttcttcgctggttcgggggtttaagagctatgctggaaacagcatagcaagtttaaataaggctagtccgttatcaacttgaaaaagtggcaccgagtcggtgc

SEQ ID NO: 1047 - RNA, 105 nt, synthetic construct
  misc_feature 1..105: note = gRNABATF_a
  source 1..105: mol_type = other RNA
cagagtgaggaggacgcaggtttaagagctatgctggaaacagcatagcaagtttaaataaggctagtccgttatcaacttgaaaaagtggcaccgagtcggtgc

SEQ ID NO: 1048 - RNA, 105 nt, synthetic construct
  misc_feature 1..105: note = gRNABBX_a
  source 1..105: mol_type = other RNA
agccctcagcggccagtcagtttaagagctatgctggaaacagcatagcaagtttaaataaggctagtccgttatcaacttgaaaaagtggcaccgagtcggtgc

SEQ ID NO: 1049 - RNA, 105 nt, synthetic construct
  misc_feature 1..105: note = gRNABHLHE40_a
  source 1..105: mol_type = other RNA
tccgactcagcgcacagacgtttaagagctatgctggaaacagcatagcaagtttaaataaggctagtccgttatcaacttgaaaaagtggcaccgagtcggtgc

SEQ ID NO: 1050 - RNA, 105 nt, synthetic construct
  misc_feature 1..105: note = gRNABNC2_a
  source 1..105: mol_type = other RNA
agaggagaccaagaggcgggtttaagagctatgctggaaacagcatagcaagtttaaataaggctagtccgttatcaacttgaaaaagtggcaccgagtcggtgc

SEQ ID NO: 1051 - RNA, 105 nt, synthetic construct
  misc_feature 1..105: note = gRNABRD4_a
  source 1..105: mol_type = other RNA
cagtggcaacacccacaaggtttaagagctatgctggaaacagcatagcaagtttaaataaggctagtccgttatcaacttgaaaaagtggcaccgagtcggtgc

SEQ ID NO: 1052 - RNA, 105 nt, synthetic construct
  misc_feature 1..105: note = gRNABRD9_a
  source 1..105: mol_type = other RNA
ccagcgagctcggcaacctgtttaagagctatgctggaaacagcatagcaagtttaaataaggctagtccgttatcaacttgaaaaagtggcaccgagtcggtgc

SEQ ID NO: 1053 - RNA, 105 nt, synthetic construct
  misc_feature 1..105: note = gRNABSX_a
  source 1..105: mol_type = other RNA
gacaagggccgggacgaaggtttaagagctatgctggaaacagcatagcaagtttaaataaggctagtccgttatcaacttgaaaaagtggcaccgagtcggtgc

SEQ ID NO: 1054 - RNA, 105 nt, synthetic construct
  misc_feature 1..105: note = gRNACCDC17_a
  source 1..105: mol_type = other RNA
tgggtggctaacagagctggtttaagagctatgctggaaacagcatagcaagtttaaataaggctagtccgttatcaacttgaaaaagtggcaccgagtcggtgc

SEQ ID NO: 1055 - RNA, 105 nt, synthetic construct
  misc_feature 1..105: note = gRNACDX1_a
  source 1..105: mol_type = other RNA
cggttgctcgtcgtcgggggtttaagagctatgctggaaacagcatagcaagtttaaataaggctagtccgttatcaacttgaaaaagtggcaccgagtcggtgc

SEQ ID NO: 1056 - RNA, 105 nt, synthetic construct
  misc_feature 1..105: note = gRNACDX2_a
  source 1..105: mol_type = other RNA
ccttcccactaggctgcaggtttaagagctatgctggaaacagcatagcaagtttaaataaggctagtccgttatcaacttgaaaaagtggcaccgagtcggtgc

SEQ ID NO: 1057 - RNA, 105 nt, synthetic construct
  misc_feature 1..105: note = gRNACDX4_a
  source 1..105: mol_type = other RNA
gtttcttacgagggtatccgtttaagagctatgctggaaacagcatagcaagtttaaataaggctagtccgttatcaacttgaaaaagtggcaccgagtcggtgc

SEQ ID NO: 1058 - RNA, 105 nt, synthetic construct
  misc_feature 1..105: note = gRNACEBPB_a
  source 1..105: mol_type = other RNA
gtggccgctattagtgagggtttaagagctatgctggaaacagcatagcaagtttaaataaggctagtccgttatcaacttgaaaaagtggcaccgagtcggtgc

SEQ ID NO: 1059 - RNA, 105 nt, synthetic construct
  misc_feature 1..105: note = gRNACENPB_a
  source 1..105: mol_type = other RNA
cgggccgggggcacctccggtttaagagctatgctggaaacagcatagcaagtttaaataaggctagtccgttatcaacttgaaaaagtggcaccgagtcggtgc

SEQ ID NO: 1060 - RNA, 105 nt, synthetic construct
  misc_feature 1..105: note = gRNACLOCK_a
  source 1..105: mol_type = other RNA
cgccgccaaggaagccaacgtttaagagctatgctggaaacagcatagcaagtttaaataaggctagtccgttatcaacttgaaaaagtggcaccgagtcggtgc

SEQ ID NO: 1061 - RNA, 105 nt, synthetic construct
  misc_feature 1..105: note = gRNACREB3_a
  source 1..105: mol_type = other RNA
tgggaggcgggtccggagagtttaagagctatgctggaaacagcatagcaagtttaaataaggctagtccgttatcaacttgaaaaagtggcaccgagtcggtgc

SEQ ID NO: 1062 - RNA, 105 nt, synthetic construct
  misc_feature 1..105: note = gRNACREB3L4_a
  source 1..105: mol_type = other RNA
aaagcgagggctacagaacgtttaagagctatgctggaaacagcatagcaagtttaaataaggctagtccgttatcaacttgaaaaagtggcaccgagtcggtgc

SEQ ID NO: 1063 - RNA, 105 nt, synthetic construct
  misc_feature 1..105: note = gRNACSRNP3_a
  source 1..105: mol_type = other RNA
cacggcatcagcctcactggtttaagagctatgctggaaacagcatagcaagtttaaataaggctagtccgttatcaacttgaaaaagtggcaccgagtcggtgc

SEQ ID NO: 1064 - RNA, 105 nt, synthetic construct
  misc_feature 1..105: note = gRNACTCF_a
  source 1..105: mol_type = other RNA
cgcggagctgcttctttgggtttaagagctatgctggaaacagcatagcaagtttaaataaggctagtccgttatcaacttgaaaaagtggcaccgagtcggtgc

SEQ ID NO: 1065 - RNA, 105 nt, synthetic construct
  misc_feature 1..105: note = gRNACUX1_a
  source 1..105: mol_type = other RNA
tgagcggctgatagagagggtttaagagctatgctggaaacagcatagcaagtttaaataaggctagtccgttatcaacttgaaaaagtggcaccgagtcggtgc

SEQ ID NO: 1066 - RNA, 105 nt, synthetic construct
  misc_feature 1..105: note = gRNACUX2_a
  source 1..105: mol_type = other RNA
gcgcgccctgggcgcattggtttaagagctatgctggaaacagcatagcaagtttaaataaggctagtccgttatcaacttgaaaaagtggcaccgagtcggtgc

SEQ ID NO: 1067 - RNA, 105 nt, synthetic construct
  misc_feature 1..105: note = gRNADACH2_a
  source 1..105: mol_type = other RNA
ggcccggaataagccccccgtttaagagctatgctggaaacagcatagcaagtttaaataaggctagtccgttatcaacttgaaaaagtggcaccgagtcggtgc

SEQ ID NO: 1068 - RNA, 105 nt, synthetic construct
  misc_feature 1..105: note = gRNADLX1_a
  source 1..105: mol_type = other RNA
ctccccaggaaccaaccaggtttaagagctatgctggaaacagcatagcaagtttaaataaggctagtccgttatcaacttgaaaaagtggcaccgagtcggtgc

SEQ ID NO: 1069 - RNA, 105 nt, synthetic construct
  misc_feature 1..105: note = gRNADLX4_a
  source 1..105: mol_type = other RNA
aagcggaagccagcacgcagtttaagagctatgctggaaacagcatagcaagtttaaataaggctagtccgttatcaacttgaaaaagtggcaccgagtcggtgc

SEQ ID NO: 1070 - RNA, 105 nt, synthetic construct
  misc_feature 1..105: note = gRNADLX5_a
  source 1..105: mol_type = other RNA
gccgcggcgaggaggagacgtttaagagctatgctggaaacagcatagcaagtttaaataaggctagtccgttatcaacttgaaaaagtggcaccgagtcggtgc

SEQ ID NO: 1071 - RNA, 105 nt, synthetic construct
  misc_feature 1..105: note = gRNADLX6_a
  source 1..105: mol_type = other RNA
gagtggctcatgtaggggtgtttaagagctatgctggaaacagcatagcaagtttaaataaggctagtccgttatcaacttgaaaaagtggcaccgagtcggtgc

SEQ ID NO: 1072 - RNA, 105 nt, synthetic construct
  misc_feature 1..105: note = gRNADMRTB1_a
  source 1..105: mol_type = other RNA
aggctgggcatcgccacgggtttaagagctatgctggaaacagcatagcaagtttaaataaggctagtccgttatcaacttgaaaaagtggcaccgagtcggtgc

SEQ ID NO: 1073 - RNA, 105 nt, synthetic construct
  misc_feature 1..105: note = gRNADNMT3B_a
  source 1..105: mol_type = other RNA
gactcgcccccaatcctgggtttaagagctatgctggaaacagcatagcaagtttaaataaggctagtccgttatcaacttgaaaaagtggcaccgagtcggtgc

SEQ ID NO: 1074 - RNA, 105 nt, synthetic construct
  misc_feature 1..105: note = gRNADOT1L_a
  source 1..105: mol_type = other RNA
gcttcacgccggcccaagagtttaagagctatgctggaaacagcatagcaagtttaaataaggctagtccgttatcaacttgaaaaagtggcaccgagtcggtgc

SEQ ID NO: 1075 - RNA, 105 nt, synthetic construct
  misc_feature 1..105: note = gRNADPF1_a
  source 1..105: mol_type = other RNA
ctacgatttcattcattctgtttaagagctatgctggaaacagcatagcaagtttaaataaggctagtccgttatcaacttgaaaaagtggcaccgagtcggtgc

SEQ ID NO: 1076 - RNA, 105 nt, synthetic construct
  misc_feature 1..105: note = gRNADR1_a
  source 1..105: mol_type = other RNA
gtagcccgaacgcagatcggtttaagagctatgctggaaacagcatagcaagtttaaataaggctagtccgttatcaacttgaaaaagtggcaccgagtcggtgc

SEQ ID NO: 1077 - RNA, 105 nt, synthetic construct
  misc_feature 1..105: note = gRNAE2F2_a
  source 1..105: mol_type = other RNA
gcgatgcgctgggatgggggtttaagagctatgctggaaacagcatagcaagtttaaataaggctagtccgttatcaacttgaaaaagtggcaccgagtcggtgc

SEQ ID NO: 1078 - RNA, 105 nt, synthetic construct
  misc_feature 1..105: note = gRNAE2F3_a
  source 1..105: mol_type = other RNA
cccggagggccgaacagacgtttaagagctatgctggaaacagcatagcaagtttaaataaggctagtccgttatcaacttgaaaaagtggcaccgagtcggtgc

SEQ ID NO: 1079 - RNA, 105 nt, synthetic construct
  misc_feature 1..105: note = gRNAEBF3_a
  source 1..105: mol_type = other RNA
ggaaagggtccattcctcggtttaagagctatgctggaaacagcatagcaagtttaaataaggctagtccgttatcaacttgaaaaagtggcaccgagtcggtgc

SEQ ID NO: 1080 - RNA, 105 nt, synthetic construct
  misc_feature 1..105: note = gRNAEGR2_a
  source 1..105: mol_type = other RNA
cagcagccggaacacagacgtttaagagctatgctggaaacagcatagcaagtttaaataaggctagtccgttatcaacttgaaaaagtggcaccgagtcggtgc

SEQ ID NO: 1081 - RNA, 105 nt, synthetic construct
  misc_feature 1..105: note = gRNAEHF_a
  source 1..105: mol_type = other RNA
aatctcaccagctcctatagtttaagagctatgctggaaacagcatagcaagtttaaataaggctagtccgttatcaacttgaaaaagtggcaccgagtcggtgc

SEQ ID NO: 1082 - RNA, 105 nt, synthetic construct
  misc_feature 1..105: note = gRNAELF5_a
  source 1..105: mol_type = other RNA
gtggctaggtccaaagagggtttaagagctatgctggaaacagcatagcaagtttaaataaggctagtccgttatcaacttgaaaaagtggcaccgagtcggtgc

SEQ ID NO: 1083 - RNA, 105 nt, synthetic construct
  misc_feature 1..105: note = gRNAELF5_b
  source 1..105: mol_type = other RNA
aggctttcaaggcaagagagtttaagagctatgctggaaacagcatagcaagtttaaataaggctagtccgttatcaacttgaaaaagtggcaccgagtcggtgc

SEQ ID NO: 1084 - RNA, 105 nt, synthetic construct
  misc_feature 1..105: note = gRNAELMSAN1_a
  source 1..105: mol_type = other RNA
gcgccgttggcctgaggtagtttaagagctatgctggaaacagcatagcaagtttaaataaggctagtccgttatcaacttgaaaaagtggcaccgagtcggtgc

SEQ ID NO: 1085 - RNA, 105 nt, synthetic construct
  misc_feature 1..105: note = gRNAEMX1_a
  source 1..105: mol_type = other RNA
aggccgctagaatggacccgtttaagagctatgctggaaacagcatagcaagtttaaataaggctagtccgttatcaacttgaaaaagtggcaccgagtcggtgc

SEQ ID NO: 1086 - RNA, 105 nt, synthetic construct
  misc_feature 1..105: note = gRNAETS2_a
  source 1..105: mol_type = other RNA
ctccagagactgacgagtggtttaagagctatgctggaaacagcatagcaagtttaaataaggctagtccgttatcaacttgaaaaagtggcaccgagtcggtgc

SEQ ID NO: 1087 - RNA, 105 nt, synthetic construct
  misc_feature 1..105: note = gRNAETV4_a
  source 1..105: mol_type = other RNA
cctcaggtgaggctgcggggtttaagagctatgctggaaacagcatagcaagtttaaataaggctagtccgttatcaacttgaaaaagtggcaccgagtcggtgc

SEQ ID NO: 1088 - RNA, 105 nt, synthetic construct
  misc_feature 1..105: note = gRNAETV4_b
  source 1..105: mol_type = other RNA
cttttgtgaatggaaccccgtttaagagctatgctggaaacagcatagcaagtttaaataaggctagtccgttatcaacttgaaaaagtggcaccgagtcggtgc

SEQ ID NO: 1089 - RNA, 105 nt, synthetic construct
  misc_feature 1..105: note = gRNAETV6_a
  source 1..105: mol_type = other RNA
cggctgccgggagagatgcgtttaagagctatgctggaaacagcatagcaagtttaaataaggctagtccgttatcaacttgaaaaagtggcaccgagtcggtgc

SEQ ID NO: 1090 - RNA, 105 nt, synthetic construct
  misc_feature 1..105: note = gRNAEZH1_a
  source 1..105: mol_type = other RNA
acccgcggctcgggatggagtttaagagctatgctggaaacagcatagcaagtttaaataaggctagtccgttatcaacttgaaaaagtggcaccgagtcggtgc

SEQ ID NO: 1091 - RNA, 105 nt, synthetic construct
  misc_feature 1..105: note = gRNAFERD3L_a
  source 1..105: mol_type = other RNA
cacatccattggcagatgggtttaagagctatgctggaaacagcatagcaagtttaaataaggctagtccgttatcaacttgaaaaagtggcaccgagtcggtgc

SEQ ID NO: 1092 - RNA, 105 nt, synthetic construct
  misc_feature 1..105: note = gRNAFERD3L_b
  source 1..105: mol_type = other RNA
aacaaggaactgtcccggggtttaagagctatgctggaaacagcatagcaagtttaaataaggctagtccgttatcaacttgaaaaagtggcaccgagtcggtgc

SEQ ID NO: 1093 - RNA, 105 nt, synthetic construct
  misc_feature 1..105: note = gRNAFIZ1_a
  source 1..105: mol_type = other RNA
ccgacattttgggcagcgggtttaagagctatgctggaaacagcatagcaagtttaaataaggctagtccgttatcaacttgaaaaagtggcaccgagtcggtgc

SEQ ID NO: 1094 - RNA, 105 nt, synthetic construct
  misc_feature 1..105: note = gRNAFOS_a
  source 1..105: mol_type = other RNA
tagtaagagaggctatcccgtttaagagctatgctggaaacagcatagcaagtttaaataaggctagtccgttatcaacttgaaaaagtggcaccgagtcggtgc

SEQ ID NO: 1095 - RNA, 105 nt, synthetic construct
  misc_feature 1..105: note = gRNAFOSB_a
  source 1..105: mol_type = other RNA
cagagctacggccacggcagtttaagagctatgctggaaacagcatagcaagtttaaataaggctagtccgttatcaacttgaaaaagtggcaccgagtcggtgc

SEQ ID NO: 1096 - RNA, 105 nt, synthetic construct
  misc_feature 1..105: note = gRNAFOXA1_a
  source 1..105: mol_type = other RNA
gcagcccgctcacttcccggtttaagagctatgctggaaacagcatagcaagtttaaataaggctagtccgttatcaacttgaaaaagtggcaccgagtcggtgc

SEQ ID NO: 1097 - RNA, 105 nt, synthetic construct
  misc_feature 1..105: note = gRNAFOXA2_a
  source 1..105: mol_type = other RNA
agctactatgcagagcccggtttaagagctatgctggaaacagcatagcaagtttaaataaggctagtccgttatcaacttgaaaaagtggcaccgagtcggtgc

SEQ ID NO: 1098 - RNA, 105 nt, synthetic construct
  misc_feature 1..105: note = gRNAFOXA3_a
  source 1..105: mol_type = other RNA
ctcgggacagccgtaccccgtttaagagctatgctggaaacagcatagcaagtttaaataaggctagtccgttatcaacttgaaaaagtggcaccgagtcggtgc

SEQ ID NO: 1099 - RNA, 105 nt, synthetic construct
  misc_feature 1..105: note = gRNAFOXC2_a
  source 1..105: mol_type = other RNA
cggcgctcgggccgagcaggtttaagagctatgctggaaacagcatagcaagtttaaataaggctagtccgttatcaacttgaaaaagtggcaccgagtcggtgc

SEQ ID NO: 1100 - RNA, 105 nt, synthetic construct
  misc_feature 1..105: note = gRNAFOXD3_a
  source 1..105: mol_type = other RNA
cgcagggtgcaggccgtaggtttaagagctatgctggaaacagcatagcaagtttaaataaggctagtccgttatcaacttgaaaaagtggcaccgagtcggtgc

SEQ ID NO: 1101 - RNA, 105 nt, synthetic construct
  misc_feature 1..105: note = gRNAFOXE1_a
  source 1..105: mol_type = other RNA
tcccctgcacacaccggacgtttaagagctatgctggaaacagcatagcaagtttaaataaggctagtccgttatcaacttgaaaaagtggcaccgagtcggtgc

SEQ ID NO: 1102 - RNA, 105 nt, synthetic construct
  misc_feature 1..105: note = gRNAFOXJ3_a
  source 1..105: mol_type = other RNA
ggcctcgaccgctcgcagtgtttaagagctatgctggaaacagcatagcaagtttaaataaggctagtccgttatcaacttgaaaaagtggcaccgagtcggtgc

SEQ ID NO: 1103 - RNA, 105 nt, synthetic construct
  misc_feature 1..105: note = gRNAFOXN2_a
  source 1..105: mol_type = other RNA
agtcgcctccgggaagacggtttaagagctatgctggaaacagcatagcaagtttaaataaggctagtccgttatcaacttgaaaaagtggcaccgagtcggtgc

SEQ ID NO: 1104 - RNA, 105 nt, synthetic construct
  misc_feature 1..105: note = gRNAFOXN4_a
  source 1..105: mol_type = other RNA
acgcgaggggcgagcgcgagtttaagagctatgctggaaacagcatagcaagtttaaataaggctagtccgttatcaacttgaaaaagtggcaccgagtcggtgc

SEQ ID NO: 1105 - RNA, 105 nt, synthetic construct
  misc_feature 1..105: note = gRNAFOXO1_a
  source 1..105: mol_type = other RNA
ccgcaggagagccaagagggtttaagagctatgctggaaacagcatagcaagtttaaataaggctagtccgttatcaacttgaaaaagtggcaccgagtcggtgc

SEQ ID NO: 1106 - RNA, 105 nt, synthetic construct
  misc_feature 1..105: note = gRNAFOXP3_a
  source 1..105: mol_type = other RNA
agagcagggacactcacctgtttaagagctatgctggaaacagcatagcaagtttaaataaggctagtccgttatcaacttgaaaaagtggcaccgagtcggtgc

SEQ ID NO: 1107 - RNA, 105 nt, synthetic construct
  misc_feature 1..105: note = gRNAFOXS1_a
  source 1..105: mol_type = other RNA
atgaccgcaagccaggcaagtttaagagctatgctggaaacagcatagcaagtttaaataaggctagtccgttatcaacttgaaaaagtggcaccgagtcggtgc

SEQ ID NO: 1108 - RNA, 105 nt, synthetic construct
  misc_feature 1..105: note = gRNAGATA2_a
  source 1..105: mol_type = other RNA
gcgaggccagcgtcgccccgtttaagagctatgctggaaacagcatagcaagtttaaataaggctagtccgttatcaacttgaaaaagtggcaccgagtcggtgc

SEQ ID NO: 1109 - RNA, 105 nt, synthetic construct
  misc_feature 1..105: note = gRNAGATA3_a
  source 1..105: mol_type = other RNA
tcgctacccaggttggtacgtttaagagctatgctggaaacagcatagcaagtttaaataaggctagtccgttatcaacttgaaaaagtggcaccgagtcggtgc

SEQ ID NO: 1110 - RNA, 105 nt, synthetic construct
  misc_feature 1..105: note = gRNAGATAD2A_a
  source 1..105: mol_type = other RNA
ctccatgtgtgcggccgaggtttaagagctatgctggaaacagcatagcaagtttaaataaggctagtccgttatcaacttgaaaaagtggcaccgagtcggtgc

SEQ ID NO: 1111 - RNA, 105 nt, synthetic construct
  misc_feature 1..105: note = gRNAGCM2_a
  source 1..105: mol_type = other RNA
caatggttatggacccggggtttaagagctatgctggaaacagcatagcaagtttaaataaggctagtccgttatcaacttgaaaaagtggcaccgagtcggtgc

SEQ ID NO: 1112 - RNA, 105 nt, synthetic construct
  misc_feature 1..105: note = gRNAGFI1_a
  source 1..105: mol_type = other RNA
ggctcggcggacctacctggtttaagagctatgctggaaacagcatagcaagtttaaataaggctagtccgttatcaacttgaaaaagtggcaccgagtcggtgc

SEQ ID NO: 1113 - RNA, 105 nt, synthetic construct
  misc_feature 1..105: note = gRNAGLI2_a
  source 1..105: mol_type = other RNA
ttgcttgccaaggggcccagtttaagagctatgctggaaacagcatagcaagtttaaataaggctagtccgttatcaacttgaaaaagtggcaccgagtcggtgc

SEQ ID NO: 1114 - RNA, 105 nt, synthetic construct
  misc_feature 1..105: note = gRNAGLYR1_a
  source 1..105: mol_type = other RNA
cggctgtgagtctgcggctgtttaagagctatgctggaaacagcatagcaagtttaaataaggctagtccgttatcaacttgaaaaagtggcaccgagtcggtgc

SEQ ID NO: 1115 - RNA, 105 nt, synthetic construct
  misc_feature 1..105: note = gRNAGPBP1L1_a
  source 1..105: mol_type = other RNA
cagcttgtcgacccggcaggtttaagagctatgctggaaacagcatagcaagtttaaataaggctagtccgttatcaacttgaaaaagtggcaccgagtcggtgc

SEQ ID NO: 1116 - RNA, 105 nt, synthetic construct
  misc_feature 1..105: note = gRNAGRHL1_a
  source 1..105: mol_type = other RNA
acagtacacccgatccggggtttaagagctatgctggaaacagcatagcaagtttaaataaggctagtccgttatcaacttgaaaaagtggcaccgagtcggtgc

SEQ ID NO: 1117 - RNA, 105 nt, synthetic construct
  misc_feature 1..105: note = gRNAGTF2B_a
  source 1..105: mol_type = other RNA
gcctccgggcagcctcgtagtttaagagctatgctggaaacagcatagcaagtttaaataaggctagtccgttatcaacttgaaaaagtggcaccgagtcggtgc

SEQ ID NO: 1118 - RNA, 105 nt, synthetic construct
  misc_feature 1..105: note = gRNAGTF2I_a
  source 1..105: mol_type = other RNA
gcgaggggcccgtgcgtgtgtttaagagctatgctggaaacagcatagcaagtttaaataaggctagtccgttatcaacttgaaaaagtggcaccgagtcggtgc

SEQ ID NO: 1119 - RNA, 105 nt, synthetic construct
  misc_feature 1..105: note = gRNAHDAC2_a
  source 1..105: mol_type = other RNA
gctcggtaccacccggcaggtttaagagctatgctggaaacagcatagcaagtttaaataaggctagtccgttatcaacttgaaaaagtggcaccgagtcggtgc

SEQ ID NO: 1120 - RNA, 105 nt, synthetic construct
  misc_feature 1..105: note = gRNAHES2_a
  source 1..105: mol_type = other RNA
gggtctcaactgttacgtggtttaagagctatgctggaaacagcatagcaagtttaaataaggctagtccgttatcaacttgaaaaagtggcaccgagtcggtgc

SEQ ID NO: 1121 - RNA, 105 nt, synthetic construct
  misc_feature 1..105: note = gRNAHES7_a
  source 1..105: mol_type = other RNA
ggaggagcaatggtcacccgtttaagagctatgctggaaacagcatagcaagtttaaataaggctagtccgttatcaacttgaaaaagtggcaccgagtcggtgc

SEQ ID NO: 1122 - RNA, 105 nt, synthetic construct
  misc_feature 1..105: note = gRNAHESX1_a
  source 1..105: mol_type = other RNA
gctctgccccacgtgtatagtttaagagctatgctggaaacagcatagcaagtttaaataaggctagtccgttatcaacttgaaaaagtggcaccgagtcggtgc

SEQ ID NO: 1123 - RNA, 105 nt, synthetic construct
  misc_feature 1..105: note = gRNAHEY1_a
  source 1..105: mol_type = other RNA
gagctggacgagaccatcggtttaagagctatgctggaaacagcatagcaagtttaaataaggctagtccgttatcaacttgaaaaagtggcaccgagtcggtgc

SEQ ID NO: 1124 - RNA, 105 nt, synthetic construct
  misc_feature 1..105: note = gRNAHIF3A_a
  source 1..105: mol_type = other RNA
tacgagtgggtgcgcacgggtttaagagctatgctggaaacagcatagcaagtttaaataaggctagtccgttatcaacttgaaaaagtggcaccgagtcggtgc

SEQ ID NO: 1125 - RNA, 105 nt, synthetic construct
  misc_feature 1..105: note = gRNAHIVEP3_a
  source 1..105: mol_type = other RNA
ggagaactgtgttggaggggtttaagagctatgctggaaacagcatagcaagtttaaataaggctagtccgttatcaacttgaaaaagtggcaccgagtcggtgc

SEQ ID NO: 1126 - RNA, 105 nt, synthetic construct
  misc_feature 1..105: note = gRNAHLF_a
  source 1..105: mol_type = other RNA
aggaaaagtgataaaagaggtttaagagctatgctggaaacagcatagcaagtttaaataaggctagtccgttatcaacttgaaaaagtggcaccgagtcggtgc

SEQ ID NO: 1127 - RNA, 105 nt, synthetic construct
  misc_feature 1..105: note = gRNAHLX_a
  source 1..105: mol_type = other RNA
gcagtaagcggccgaccaggtttaagagctatgctggaaacagcatagcaagtttaaataaggctagtccgttatcaacttgaaaaagtggcaccgagtcggtgc

SEQ ID NO: 1128 - RNA, 105 nt, synthetic construct
  misc_feature 1..105: note = gRNAHMG20A_a
  source 1..105: mol_type = other RNA
aagtgaaggcgattgagaggtttaagagctatgctggaaacagcatagcaagtttaaataaggctagtccgttatcaacttgaaaaagtggcaccgagtcggtgc

SEQ ID NO: 1129 - RNA, 105 nt, synthetic construct
  misc_feature 1..105: note = gRNAHMGA2_a
  source 1..105: mol_type = other RNA
atcaacaccggacgtccaggtttaagagctatgctggaaacagcatagcaagtttaaataaggctagtccgttatcaacttgaaaaagtggcaccgagtcggtgc

SEQ ID NO: 1130 - RNA, 105 nt, synthetic construct
  misc_feature 1..105: note = gRNAHMGA2_b
  source 1..105: mol_type = other RNA
ttcgggagatgaggtgatagtttaagagctatgctggaaacagcatagcaagtttaaataaggctagtccgttatcaacttgaaaaagtggcaccgagtcggtgc

SEQ ID NO: 1131 - RNA, 105 nt, synthetic construct
  misc_feature 1..105: note = gRNAHMGA2_c
  source 1..105: mol_type = other RNA
gtccctgggctgaagtggagtttaagagctatgctggaaacagcatagcaagtttaaataaggctagtccgttatcaacttgaaaaagtggcaccgagtcggtgc

SEQ ID NO: 1132 - RNA, 105 nt, synthetic construct
  misc_feature 1..105: note = gRNAHMGN3_a
  source 1..105: mol_type = other RNA
cctcattggagcagcaggggtttaagagctatgctggaaacagcatagcaagtttaaataaggctagtccgttatcaacttgaaaaagtggcaccgagtcggtgc

SEQ ID NO: 1133 - RNA, 105 nt, synthetic construct
  misc_feature 1..105: note = gRNAHMX2_a
  source 1..105: mol_type = other RNA
gggacatgcaggcaccggagtttaagagctatgctggaaacagcatagcaagtttaaataaggctagtccgttatcaacttgaaaaagtggcaccgagtcggtgc

SEQ ID NO: 1134 - RNA, 105 nt, synthetic construct
  misc_feature 1..105: note = gRNAHNF1A_a
  source 1..105: mol_type = other RNA
atgtaaacagaacaggcaggtttaagagctatgctggaaacagcatagcaagtttaaataaggctagtccgttatcaacttgaaaaagtggcaccgagtcggtgc

SEQ ID NO: 1135 - RNA, 105 nt, synthetic construct
  misc_feature 1..105: note = gRNAHNF4G_a
  source 1..105: mol_type = other RNA
agattctatataattcaaggtttaagagctatgctggaaacagcatagcaagtttaaataaggctagtccgttatcaacttgaaaaagtggcaccgagtcggtgc

SEQ ID NO: 1136 - RNA, 105 nt, synthetic construct
  misc_feature 1..105: note = gRNAHNF4G_b
  source 1..105: mol_type = other RNA
agccgcccgaggggaaccggtttaagagctatgctggaaacagcatagcaagtttaaataaggctagtccgttatcaacttgaaaaagtggcaccgagtcggtgc

SEQ ID NO: 1137 - RNA, 105 nt, synthetic construct
  misc_feature 1..105: note = gRNAHOXA1_a
  source 1..105: mol_type = other RNA
ttcttctccggccccatgggtttaagagctatgctggaaacagcatagcaagtttaaataaggctagtccgttatcaacttgaaaaagtggcaccgagtcggtgc

SEQ ID NO: 1138 - RNA, 105 nt, synthetic construct
  misc_feature 1..105: note = gRNAHOXA11_a
  source 1..105: mol_type = other RNA
ggcgcgaagacggggtctggtttaagagctatgctggaaacagcatagcaagtttaaataaggctagtccgttatcaacttgaaaaagtggcaccgagtcggtgc

SEQ ID NO: 1139 - RNA, 105 nt, synthetic construct
  misc_feature 1..105: note = gRNAHOXB1_a
  source 1..105: mol_type = other RNA
atactgccgaaaggttgtagtttaagagctatgctggaaacagcatagcaagtttaaataaggctagtccgttatcaacttgaaaaagtggcaccgagtcggtgc

SEQ ID NO: 1140 - RNA, 105 nt, synthetic construct
  misc_feature 1..105: note = gRNAHOXB2_a
  source 1..105: mol_type = other RNA
ggtggggagattttcccctgtttaagagctatgctggaaacagcatagcaagtttaaataaggctagtccgttatcaacttgaaaaagtggcaccgagtcggtgc

SEQ ID NO: 1141 - RNA, 105 nt, synthetic construct
  misc_feature 1..105: note = gRNAHOXB3_a
  source 1..105: mol_type = other RNA
ttaactgctcgctgtggtggtttaagagctatgctggaaacagcatagcaagtttaaataaggctagtccgttatcaacttgaaaaagtggcaccgagtcggtgc

SEQ ID NO: 1142 - RNA, 105 nt, synthetic construct
  misc_feature 1..105: note = gRNAHOXC12_a
  source 1..105: mol_type = other RNA
acactgggctgccgaggtagtttaagagctatgctggaaacagcatagcaagtttaaataaggctagtccgttatcaacttgaaaaagtggcaccgagtcggtgc

SEQ ID NO: 1143 - RNA, 105 nt, synthetic construct
  misc_feature 1..105: note = gRNAHOXC9_a
  source 1..105: mol_type = other RNA
ccgtacgggtgatataccagtttaagagctatgctggaaacagcatagcaagtttaaataaggctagtccgttatcaacttgaaaaagtggcaccgagtcggtgc

SEQ ID NO: 1144 - RNA, 105 nt, synthetic construct
  misc_feature 1..105: note = gRNAHOXC9_a
  source 1..105: mol_type = other RNA
ggcttgggcgcgaagctacgtttaagagctatgctggaaacagcatagcaagtttaaataaggctagtccgttatcaacttgaaaaagtggcaccgagtcggtgc

SEQ ID NO: 1145 - RNA, 105 nt, synthetic construct
  misc_feature 1..105: note = gRNAHOXD9_a
  source 1..105: mol_type = other RNA
cggcggacagtgtaatgttgtttaagagctatgctggaaacagcatagcaagtttaaataaggctagtccgttatcaacttgaaaaagtggcaccgagtcggtgc

SEQ ID NO: 1146 - RNA, 105 nt, synthetic construct
  misc_feature 1..105: note = gRNAHSF4_a
  source 1..105: mol_type = other RNA
gcatggtgcagtctcggccgtttaagagctatgctggaaacagcatagcaagtttaaataaggctagtccgttatcaacttgaaaaagtggcaccgagtcggtgc

SEQ ID NO: 1147 - RNA, 105 nt, synthetic construct
  misc_feature 1..105: note = gRNAHSF5_a
  source 1..105: mol_type = other RNA
cagggcgaggcgaaggccggtttaagagctatgctggaaacagcatagcaagtttaaataaggctagtccgttatcaacttgaaaaagtggcaccgagtcggtgc

SEQ ID NO: 1148 - RNA, 105 nt, synthetic construct
  misc_feature 1..105: note = gRNAIKZF1_a
  source 1..105: mol_type = other RNA
tgcgccgcgcggggacccagtttaagagctatgctggaaacagcatagcaagtttaaataaggctagtccgttatcaacttgaaaaagtggcaccgagtcggtgc

SEQ ID NO: 1149 - RNA, 105 nt, synthetic construct
  misc_feature 1..105: note = gRNAIKZF2_a
  source 1..105: mol_type = other RNA
gcagtggatctgtagctaagtttaagagctatgctggaaacagcatagcaagtttaaataaggctagtccgttatcaacttgaaaaagtggcaccgagtcggtgc

SEQ ID NO: 1150 - RNA, 105 nt, synthetic construct
  misc_feature 1..105: note = gRNAIKZF3_a
  source 1..105: mol_type = other RNA
gcgcgctgagtccaggcgagtttaagagctatgctggaaacagcatagcaagtttaaataaggctagtccgttatcaacttgaaaaagtggcaccgagtcggtgc

SEQ ID NO: 1151 - RNA, 105 nt, synthetic construct
  misc_feature 1..105: note = gRNAIKZF4_a
  source 1..105: mol_type = other RNA
tccctcgccgtttccaagggtttaagagctatgctggaaacagcatagcaagtttaaataaggctagtccgttatcaacttgaaaaagtggcaccgagtcggtgc

SEQ ID NO: 1152 - RNA, 105 nt, synthetic construct
  misc_feature 1..105: note = gRNAIRF7_a
  source 1..105: mol_type = other RNA
ctctggcacccaggtactggtttaagagctatgctggaaacagcatagcaagtttaaataaggctagtccgttatcaacttgaaaaagtggcaccgagtcggtgc

SEQ ID NO: 1153 - RNA, 105 nt, synthetic construct
  misc_feature 1..105: note = gRNAIRX3_a
  source 1..105: mol_type = other RNA
gtaaggcagccaaaagttggtttaagagctatgctggaaacagcatagcaagtttaaataaggctagtccgttatcaacttgaaaaagtggcaccgagtcggtgc

SEQ ID NO: 1154 - RNA, 105 nt, synthetic construct
  misc_feature 1..105: note = gRNAISL2_a
  source 1..105: mol_type = other RNA
actaactcctactgccccggtttaagagctatgctggaaacagcatagcaagtttaaataaggctagtccgttatcaacttgaaaaagtggcaccgagtcggtgc

SEQ ID NO: 1155 - RNA, 105 nt, synthetic construct
  misc_feature 1..105: note = gRNAJRK_a
  source 1..105: mol_type = other RNA
agtggccggcacttccggcgtttaagagctatgctggaaacagcatagcaagtttaaataaggctagtccgttatcaacttgaaaaagtggcaccgagtcggtgc

SEQ ID NO: 1156 - RNA, 105 nt, synthetic construct
  misc_feature 1..105: note = gRNAJRK_b
  source 1..105: mol_type = other RNA
tcctgaccgtcatcagcaagtttaagagctatgctggaaacagcatagcaagtttaaataaggctagtccgttatcaacttgaaaaagtggcaccgagtcggtgc

SEQ ID NO: 1157 - RNA, 105 nt, synthetic construct
  misc_feature 1..105: note = gRNAJRKL_a
  source 1..105: mol_type = other RNA
gactgccgcgcgatagtcagtttaagagctatgctggaaacagcatagcaagtttaaataaggctagtccgttatcaacttgaaaaagtggcaccgagtcggtgc

SEQ ID NO: 1158 - RNA, 105 nt, synthetic construct
  misc_feature 1..105: note = gRNAKAT7_a
  source 1..105: mol_type = other RNA
gctccagacgctgagaggcgtttaagagctatgctggaaacagcatagcaagtttaaataaggctagtccgttatcaacttgaaaaagtggcaccgagtcggtgc

SEQ ID NO: 1159 - RNA, 105 nt, synthetic construct
  misc_feature 1..105: note = gRNAKDM1A_a
  source 1..105: mol_type = other RNA
cacggagcgacagagcgaggtttaagagctatgctggaaacagcatagcaagtttaaataaggctagtccgttatcaacttgaaaaagtggcaccgagtcggtgc

SEQ ID NO: 1160 - RNA, 105 nt, synthetic construct
  misc_feature 1..105: note = gRNAKDM2B_a
  source 1..105: mol_type = other RNA
ctcggcttccatacctatagtttaagagctatgctggaaacagcatagcaagtttaaataaggctagtccgttatcaacttgaaaaagtggcaccgagtcggtgc

SEQ ID NO: 1161 - RNA, 105 nt, synthetic construct
  misc_feature 1..105: note = gRNAKDM5D_a
  source 1..105: mol_type = other RNA
aactaggatccctgacgatgtttaagagctatgctggaaacagcatagcaagtttaaataaggctagtccgttatcaacttgaaaaagtggcaccgagtcggtgc

SEQ ID NO: 1162 - RNA, 105 nt, synthetic construct
  misc_feature 1..105: note = gRNAKLF14_a
  source 1..105: mol_type = other RNA
ctcggcggcgaagtagtccgtttaagagctatgctggaaacagcatagcaagtttaaataaggctagtccgttatcaacttgaaaaagtggcaccgagtcggtgc

SEQ ID NO: 1163 - RNA, 105 nt, synthetic construct
  misc_feature 1..105: note = gRNAKLF9_a
  source 1..105: mol_type = other RNA
caagggagccggctcagaggtttaagagctatgctggaaacagcatagcaagtttaaataaggctagtccgttatcaacttgaaaaagtggcaccgagtcggtgc

SEQ ID NO: 1164 - RNA, 105 nt, synthetic construct
  misc_feature 1..105: note = gRNAKMT2B_a
  source 1..105: mol_type = other RNA
catcttggcaccgtgagaggtttaagagctatgctggaaacagcatagcaagtttaaataaggctagtccgttatcaacttgaaaaagtggcaccgagtcggtgc

SEQ ID NO: 1165 - RNA, 105 nt, synthetic construct
  misc_feature 1..105: note = gRNAKMT2B_b
  source 1..105: mol_type = other RNA
gggccaaaaaagtaaagatgtttaagagctatgctggaaacagcatagcaagtttaaataaggctagtccgttatcaacttgaaaaagtggcaccgagtcggtgc

SEQ ID NO: 1166 - RNA, 105 nt, synthetic construct
  misc_feature 1..105: note = gRNAL3MBTL4_a
  source 1..105: mol_type = other RNA
acgccgaccgagctacagggtttaagagctatgctggaaacagcatagcaagtttaaataaggctagtccgttatcaacttgaaaaagtggcaccgagtcggtgc

SEQ ID NO: 1167 - RNA, 105 nt, synthetic construct
  misc_feature 1..105: note = gRNALEF1_a
  source 1..105: mol_type = other RNA
gctctcgggccgaggaaccgtttaagagctatgctggaaacagcatagcaagtttaaataaggctagtccgttatcaacttgaaaaagtggcaccgagtcggtgc

SEQ ID NO: 1168 - RNA, 105 nt, synthetic construct
  misc_feature 1..105: note = gRNALHX6_a
  source 1..105: mol_type = other RNA
agaagctggcggacatgacgtttaagagctatgctggaaacagcatagcaagtttaaataaggctagtccgttatcaacttgaaaaagtggcaccgagtcggtgc

SEQ ID NO: 1169 - RNA, 105 nt, synthetic construct
  misc_feature 1..105: note = gRNALHX9_a
  source 1..105: mol_type = other RNA
gggaacttgcaagcagccagtttaagagctatgctggaaacagcatagcaagtttaaataaggctagtccgttatcaacttgaaaaagtggcaccgagtcggtgc

SEQ ID NO: 1170 - RNA, 105 nt, synthetic construct
  misc_feature 1..105: note = gRNALIN28A_a
  source 1..105: mol_type = other RNA
aagtccgaaggcaaagggtgtttaagagctatgctggaaacagcatagcaagtttaaataaggctagtccgttatcaacttgaaaaagtggcaccgagtcggtgc

SEQ ID NO: 1171 - RNA, 105 nt, synthetic construct
  misc_feature 1..105: note = gRNALIN28A_a
  source 1..105: mol_type = other RNA
cgtgcgcgccagactacgtgtttaagagctatgctggaaacagcatagcaagtttaaataaggctagtccgttatcaacttgaaaaagtggcaccgagtcggtgc

SEQ ID NO: 1172 - RNA, 105 nt, synthetic construct
  misc_feature 1..105: note = gRNALMX1A_a
  source 1..105: mol_type = other RNA
cctccggctgcagtctcgggtttaagagctatgctggaaacagcatagcaagtttaaataaggctagtccgttatcaacttgaaaaagtggcaccgagtcggtgc

SEQ ID NO: 1173 - RNA, 105 nt, synthetic construct
  misc_feature 1..105: note = gRNAMAF_a
  source 1..105: mol_type = other RNA
agaggtgcagcccgactgggtttaagagctatgctggaaacagcatagcaagtttaaataaggctagtccgttatcaacttgaaaaagtggcaccgagtcggtgc

SEQ ID NO: 1174 - RNA, 105 nt, synthetic construct
  misc_feature 1..105: note = gRNAMAFF_a
  source 1..105: mol_type = other RNA
cccggttcagagcgacctggtttaagagctatgctggaaacagcatagcaagtttaaataaggctagtccgttatcaacttgaaaaagtggcaccgagtcggtgc

SEQ ID NO: 1175 - RNA, 105 nt, synthetic construct
  misc_feature 1..105: note = gRNAMBD3_a
  source 1..105: mol_type = other RNA
agaagtgcccagaaggtcggtttaagagctatgctggaaacagcatagcaagtttaaataaggctagtccgttatcaacttgaaaaagtggcaccgagtcggtgc

SEQ ID NO: 1176 - RNA, 105 nt, synthetic construct
  misc_feature 1..105: note = gRNAMBD4_a
  source 1..105: mol_type = other RNA
ccggtgccgtgagctgaaggtttaagagctatgctggaaacagcatagcaagtttaaataaggctagtccgttatcaacttgaaaaagtggcaccgagtcggtgc

SEQ ID NO: 1177 - RNA, 105 nt, synthetic construct
  misc_feature 1..105: note = gRNAMBNL2_a
  source 1..105: mol_type = other RNA
gaaagccgtctgccgtatcgtttaagagctatgctggaaacagcatagcaagtttaaataaggctagtccgttatcaacttgaaaaagtggcaccgagtcggtgc

SEQ ID NO: 1178 - RNA, 105 nt, synthetic construct
  misc_feature 1..105: note = gRNAMED1_a
  source 1..105: mol_type = other RNA
aagaagagaagggtgctcggtttaagagctatgctggaaacagcatagcaagtttaaataaggctagtccgttatcaacttgaaaaagtggcaccgagtcggtgc

SEQ ID NO: 1179 - RNA, 105 nt, synthetic construct
  misc_feature 1..105: note = gRNAMED14_a
  source 1..105: mol_type = other RNA
ctgcagaggaccttccgacgtttaagagctatgctggaaacagcatagcaagtttaaataaggctagtccgttatcaacttgaaaaagtggcaccgagtcggtgc

SEQ ID NO: 1180 - RNA, 105 nt, synthetic construct
  misc_feature 1..105: note = gRNAMED23_a
  source 1..105: mol_type = other RNA
aagcgacgccgaggagctagtttaagagctatgctggaaacagcatagcaagtttaaataaggctagtccgttatcaacttgaaaaagtggcaccgagtcggtgc

SEQ ID NO: 1181 - RNA, 105 nt, synthetic construct
  misc_feature 1..105: note = gRNAMED24_a
  source 1..105: mol_type = other RNA
tgtgcggtaggcttaaattgtttaagagctatgctggaaacagcatagcaagtttaaataaggctagtccgttatcaacttgaaaaagtggcaccgagtcggtgc

SEQ ID NO: 1182 - RNA, 105 nt, synthetic construct
  misc_feature 1..105: note = gRNAMEF2C_a
  source 1..105: mol_type = other RNA
tagcagcccgaagatgtctgtttaagagctatgctggaaacagcatagcaagtttaaataaggctagtccgttatcaacttgaaaaagtggcaccgagtcggtgc

SEQ ID NO: 1183 - RNA, 105 nt, synthetic construct
  misc_feature 1..105: note = gRNAMEF2D_a
  source 1..105: mol_type = other RNA
cgggagtcgaggccgacgtgtttaagagctatgctggaaacagcatagcaagtttaaataaggctagtccgttatcaacttgaaaaagtggcaccgagtcggtgc

SEQ ID NO: 1184 - RNA, 105 nt, synthetic construct
  misc_feature 1..105: note = gRNAMEIS3_a
  source 1..105: mol_type = other RNA
caacaccgcgggccgtcaggtttaagagctatgctggaaacagcatagcaagtttaaataaggctagtccgttatcaacttgaaaaagtggcaccgagtcggtgc

SEQ ID NO: 1185 - RNA, 105 nt, synthetic construct
  misc_feature 1..105: note = gRNAMESP1_a
  source 1..105: mol_type = other RNA
ctggagactctcctcgctggtttaagagctatgctggaaacagcatagcaagtttaaataaggctagtccgttatcaacttgaaaaagtggcaccgagtcggtgc

SEQ ID NO: 1186 - RNA, 105 nt, synthetic construct
  misc_feature 1..105: note = gRNAMESP1_b
  source 1..105: mol_type = other RNA
gcctagcacggccgacagggtttaagagctatgctggaaacagcatagcaagtttaaataaggctagtccgttatcaacttgaaaaagtggcaccgagtcggtgc

SEQ ID NO: 1187 - RNA, 105 nt, synthetic construct
  misc_feature 1..105: note = gRNAMGA_a
  source 1..105: mol_type = other RNA
gaccacaggggcgcgccaagtttaagagctatgctggaaacagcatagcaagtttaaataaggctagtccgttatcaacttgaaaaagtggcaccgagtcggtgc

SEQ ID NO: 1188 - RNA, 105 nt, synthetic construct
  misc_feature 1..105: note = gRNAMITF_a
  source 1..105: mol_type = other RNA
ttggaattatagaaagtaggtttaagagctatgctggaaacagcatagcaagtttaaataaggctagtccgttatcaacttgaaaaagtggcaccgagtcggtgc

SEQ ID NO: 1189 - RNA, 105 nt, synthetic construct
  misc_feature 1..105: note = gRNAMLX_a
  source 1..105: mol_type = other RNA
ccttgacccaagggtcctcgtttaagagctatgctggaaacagcatagcaagtttaaataaggctagtccgttatcaacttgaaaaagtggcaccgagtcggtgc

SEQ ID NO: 1190 - RNA, 105 nt, synthetic construct
  misc_feature 1..105: note = gRNAMNX1_a
  source 1..105: mol_type = other RNA
gcgcgggtccccaccacgggtttaagagctatgctggaaacagcatagcaagtttaaataaggctagtccgttatcaacttgaaaaagtggcaccgagtcggtgc

SEQ ID NO: 1191 - RNA, 105 nt, synthetic construct
  misc_feature 1..105: note = gRNAMYF5_a
  source 1..105: mol_type = other RNA
ccgatgggcaaatcccggggtttaagagctatgctggaaacagcatagcaagtttaaataaggctagtccgttatcaacttgaaaaagtggcaccgagtcggtgc

SEQ ID NO: 1192 - RNA, 105 nt, synthetic construct
  misc_feature 1..105: note = gRNAMYOG_a
  source 1..105: mol_type = other RNA
cggggttcctggtagaagtgtttaagagctatgctggaaacagcatagcaagtttaaataaggctagtccgttatcaacttgaaaaagtggcaccgagtcggtgc

SEQ ID NO: 1193 - RNA, 105 nt, synthetic construct
  misc_feature 1..105: note = gRNAMYPOP_a
  source 1..105: mol_type = other RNA
ggagccggtgagtgacccggtttaagagctatgctggaaacagcatagcaagtttaaataaggctagtccgttatcaacttgaaaaagtggcaccgagtcggtgc

SEQ ID NO: 1194 - RNA, 105 nt, synthetic construct
  misc_feature 1..105: note = gRNAMYRFL_a
  source 1..105: mol_type = other RNA
cttcattatcagaaagtaggtttaagagctatgctggaaacagcatagcaagtttaaataaggctagtccgttatcaacttgaaaaagtggcaccgagtcggtgc

SEQ ID NO: 1195 - RNA, 105 nt, synthetic construct
  misc_feature 1..105: note = gRNAMYT1L_a
  source 1..105: mol_type = other RNA
gtgcttcaacaagactgcagtttaagagctatgctggaaacagcatagcaagtttaaataaggctagtccgttatcaacttgaaaaagtggcaccgagtcggtgc

SEQ ID NO: 1196 - RNA, 105 nt, synthetic construct
  misc_feature 1..105: note = gRNANCOR1_a
  source 1..105: mol_type = other RNA
tcccggggcagcagccgctgtttaagagctatgctggaaacagcatagcaagtttaaataaggctagtccgttatcaacttgaaaaagtggcaccgagtcggtgc

SEQ ID NO: 1197 - RNA, 105 nt, synthetic construct
  misc_feature 1..105: note = gRNANEUROG1_b
  source 1..105: mol_type = other RNA
ctcgtgtgagcaccgagtggtttaagagctatgctggaaacagcatagcaagtttaaataaggctagtccgttatcaacttgaaaaagtggcaccgagtcggtgc

SEQ ID NO: 1198 - RNA, 105 nt, synthetic construct
  misc_feature 1..105: note = gRNANFAT5_a
  source 1..105: mol_type = other RNA
gtccccgtcccgccggggggtttaagagctatgctggaaacagcatagcaagtttaaataaggctagtccgttatcaacttgaaaaagtggcaccgagtcggtgc

SEQ ID NO: 1199 - RNA, 105 nt, synthetic construct
  misc_feature 1..105: note = gRNANFATC2_a
  source 1..105: mol_type = other RNA
gcgatccggcttactccaggtttaagagctatgctggaaacagcatagcaagtttaaataaggctagtccgttatcaacttgaaaaagtggcaccgagtcggtgc

SEQ ID NO: 1200 - RNA, 105 nt, synthetic construct
  misc_feature 1..105: note = gRNANFATC2_b
  source 1..105: mol_type = other RNA
agaggctgcgttcagactggtttaagagctatgctggaaacagcatagcaagtttaaataaggctagtccgttatcaacttgaaaaagtggcaccgagtcggtgc

SEQ ID NO: 1201 - RNA, 105 nt, synthetic construct
  misc_feature 1..105: note = gRNANFATC3_a
  source 1..105: mol_type = other RNA
gaggcttaggcaccggtgggtttaagagctatgctggaaacagcatagcaagtttaaataaggctagtccgttatcaacttgaaaaagtggcaccgagtcggtgc

SEQ ID NO: 1202 - RNA, 105 nt, synthetic construct
  misc_feature 1..105: note = gRNANFE2L1_a
  source 1..105: mol_type = other RNA
ccctggaggctagaagctcgtttaagagctatgctggaaacagcatagcaagtttaaataaggctagtccgttatcaacttgaaaaagtggcaccgagtcggtgc

SEQ ID NO: 1203 - RNA, 105 nt, synthetic construct
  misc_feature 1..105: note = gRNANFE2L3_a
  source 1..105: mol_type = other RNA
gggtccgcacgtgtcacccgtttaagagctatgctggaaacagcatagcaagtttaaataaggctagtccgttatcaacttgaaaaagtggcaccgagtcggtgc

SEQ ID NO: 1204 - RNA, 105 nt, synthetic construct
  misc_feature 1..105: note = gRNANFIA_a
  source 1..105: mol_type = other RNA
tccacgccgcggcttacctgtttaagagctatgctggaaacagcatagcaagtttaaataaggctagtccgttatcaacttgaaaaagtggcaccgagtcggtgc

SEQ ID NO: 1205 - RNA, 105 nt, synthetic construct
  misc_feature 1..105: note = gRNANFYB_a
  source 1..105: mol_type = other RNA
ccccgggcccggagctcaagtttaagagctatgctggaaacagcatagcaagtttaaataaggctagtccgttatcaacttgaaaaagtggcaccgagtcggtgc

SEQ ID NO: 1206 - RNA, 105 nt, synthetic construct
  misc_feature 1..105: note = gRNANKX1-2_a
  source 1..105: mol_type = other RNA
cgggaagccaggaaaagttgtttaagagctatgctggaaacagcatagcaagtttaaataaggctagtccgttatcaacttgaaaaagtggcaccgagtcggtgc

SEQ ID NO: 1207 - RNA, 105 nt, synthetic construct
  misc_feature 1..105: note = gRNANKX2-3_a
  source 1..105: mol_type = other RNA
gtctgtcaaaagcccgactgtttaagagctatgctggaaacagcatagcaagtttaaataaggctagtccgttatcaacttgaaaaagtggcaccgagtcggtgc

SEQ ID NO: 1208 - RNA, 105 nt, synthetic construct
  misc_feature 1..105: note = gRNANKX2-4_a
  source 1..105: mol_type = other RNA
gcctgtgacgaggagtcgggtttaagagctatgctggaaacagcatagcaagtttaaataaggctagtccgttatcaacttgaaaaagtggcaccgagtcggtgc

SEQ ID NO: 1209 - RNA, 105 nt, synthetic construct
  misc_feature 1..105: note = gRNANKX2-5_a
  source 1..105: mol_type = other RNA
gccagctctggatgtgtccgtttaagagctatgctggaaacagcatagcaagtttaaataaggctagtccgttatcaacttgaaaaagtggcaccgagtcggtgc

SEQ ID NO: 1210 - RNA, 105 nt, synthetic construct
  misc_feature 1..105: note = gRNANOTCH3_a
  source 1..105: mol_type = other RNA
tgggctccgggcgcgtcccgtttaagagctatgctggaaacagcatagcaagtttaaataaggctagtccgttatcaacttgaaaaagtggcaccgagtcggtgc

SEQ ID NO: 1211 - RNA, 105 nt, synthetic construct
  misc_feature 1..105: note = gRNANOTO_a
  source 1..105: mol_type = other RNA
caggaggttcccagacaacgtttaagagctatgctggaaacagcatagcaagtttaaataaggctagtccgttatcaacttgaaaaagtggcaccgagtcggtgc

SEQ ID NO: 1212 - RNA, 105 nt, synthetic construct
  misc_feature 1..105: note = gRNANOTO_b
  source 1..105: mol_type = other RNA
cctggggctaggcatgacggtttaagagctatgctggaaacagcatagcaagtttaaataaggctagtccgttatcaacttgaaaaagtggcaccgagtcggtgc

SEQ ID NO: 1213 - RNA, 105 nt, synthetic construct
  misc_feature 1..105: note = gRNANR1H2_a
  source 1..105: mol_type = other RNA
gcggggttgccggaagaaggtttaagagctatgctggaaacagcatagcaagtttaaataaggctagtccgttatcaacttgaaaaagtggcaccgagtcggtgc

SEQ ID NO: 1214 - RNA, 105 nt, synthetic construct
  misc_feature 1..105: note = gRNANR1H4_a
  source 1..105: mol_type = other RNA
aaatcgctgggatctggaggtttaagagctatgctggaaacagcatagcaagtttaaataaggctagtccgttatcaacttgaaaaagtggcaccgagtcggtgc

SEQ ID NO: 1215 - RNA, 105 nt, synthetic construct
  misc_feature 1..105: note = gRNANR1I2_a
  source 1..105: mol_type = other RNA
aatactcctgtcctgaacagtttaagagctatgctggaaacagcatagcaagtttaaataaggctagtccgttatcaacttgaaaaagtggcaccgagtcggtgc

SEQ ID NO: 1216 - RNA, 105 nt, synthetic construct
  misc_feature 1..105: note = gRNANR2C2_a
  source 1..105: mol_type = other RNA
ccgccgcccgcgcgctggtgtttaagagctatgctggaaacagcatagcaagtttaaataaggctagtccgttatcaacttgaaaaagtggcaccgagtcggtgc

SEQ ID NO: 1217 - RNA, 105 nt, synthetic construct
  misc_feature 1..105: note = gRNANR2F1_a
  source 1..105: mol_type = other RNA
gaatggagtaaaagagacagtttaagagctatgctggaaacagcatagcaagtttaaataaggctagtccgttatcaacttgaaaaagtggcaccgagtcggtgc

SEQ ID NO: 1218 - RNA, 105 nt, synthetic construct
  misc_feature 1..105: note = gRNANR5A2_b
  source 1..105: mol_type = other RNA
tccggcgaaaagaaggaaggtttaagagctatgctggaaacagcatagcaagtttaaataaggctagtccgttatcaacttgaaaaagtggcaccgagtcggtgc

SEQ ID NO: 1219 - RNA, 105 nt, synthetic construct
  misc_feature 1..105: note = gRNAOSR2_a
  source 1..105: mol_type = other RNA
gcccaagactcccggcctggtttaagagctatgctggaaacagcatagcaagtttaaataaggctagtccgttatcaacttgaaaaagtggcaccgagtcggtgc

SEQ ID NO: 1220 - RNA, 105 nt, synthetic construct
  misc_feature 1..105: note = gRNAOTX1_a
  source 1..105: mol_type = other RNA
cactcccggtgcaacgtgggtttaagagctatgctggaaacagcatagcaagtttaaataaggctagtccgttatcaacttgaaaaagtggcaccgagtcggtgc

SEQ ID NO: 1221 - RNA, 105 nt, synthetic construct
  misc_feature 1..105: note = gRNAOVOL1_a
  source 1..105: mol_type = other RNA
aacagggaaggagtcgctagtttaagagctatgctggaaacagcatagcaagtttaaataaggctagtccgttatcaacttgaaaaagtggcaccgagtcggtgc

SEQ ID NO: 1222 - RNA, 105 nt, synthetic construct
  misc_feature 1..105: note = gRNAPA2G4_a
  source 1..105: mol_type = other RNA
cccaggctgaagtctatgggtttaagagctatgctggaaacagcatagcaagtttaaataaggctagtccgttatcaacttgaaaaagtggcaccgagtcggtgc

SEQ ID NO: 1223 - RNA, 105 nt, synthetic construct
  misc_feature 1..105: note = gRNAPATZ1_a
  source 1..105: mol_type = other RNA
ctgtggagccagaactggggtttaagagctatgctggaaacagcatagcaagtttaaataaggctagtccgttatcaacttgaaaaagtggcaccgagtcggtgc

SEQ ID NO: 1224 - RNA, 105 nt, synthetic construct
  misc_feature 1..105: note = gRNAPAX9_a
  source 1..105: mol_type = other RNA
ctgtcagagccgggaaggggtttaagagctatgctggaaacagcatagcaagtttaaataaggctagtccgttatcaacttgaaaaagtggcaccgagtcggtgc

SEQ ID NO: 1225 - RNA, 105 nt, synthetic construct
  misc_feature 1..105: note = gRNAPAX9_a
  source 1..105: mol_type = other RNA
gacacgaccggagccctgcgtttaagagctatgctggaaacagcatagcaagtttaaataaggctagtccgttatcaacttgaaaaagtggcaccgagtcggtgc

SEQ ID NO: 1226 - RNA, 105 nt, synthetic construct
  misc_feature 1..105: note = gRNAPBX4_a
  source 1..105: mol_type = other RNA
tggaggccagactgacgaggtttaagagctatgctggaaacagcatagcaagtttaaataaggctagtccgttatcaacttgaaaaagtggcaccgagtcggtgc

SEQ ID NO: 1227 - RNA, 105 nt, synthetic construct
  misc_feature 1..105: note = gRNAPGR_a
  source 1..105: mol_type = other RNA
ccacagctgtcactaatcggtttaagagctatgctggaaacagcatagcaagtttaaataaggctagtccgttatcaacttgaaaaagtggcaccgagtcggtgc

SEQ ID NO: 1228 - RNA, 105 nt, synthetic construct
  misc_feature 1..105: note = gRNAPITX1_a
  source 1..105: mol_type = other RNA
agactctgccggcgccgtcgtttaagagctatgctggaaacagcatagcaagtttaaataaggctagtccgttatcaacttgaaaaagtggcaccgagtcggtgc

SEQ ID NO: 1229 - RNA, 105 nt, synthetic construct
  misc_feature 1..105: note = gRNAPITX3_a
  source 1..105: mol_type = other RNA
caggagcgcccgagcggaggtttaagagctatgctggaaacagcatagcaagtttaaataaggctagtccgttatcaacttgaaaaagtggcaccgagtcggtgc

SEQ ID NO: 1230 - RNA, 105 nt, synthetic construct
  misc_feature 1..105: note = gRNAPITX3_b
  source 1..105: mol_type = other RNA
tcgggcgctcctggactctgtttaagagctatgctggaaacagcatagcaagtttaaataaggctagtccgttatcaacttgaaaaagtggcaccgagtcggtgc

SEQ ID NO: 1231 - RNA, 105 nt, synthetic construct
  misc_feature 1..105: note = gRNAPITX3_c
  source 1..105: mol_type = other RNA
gctgcggcggcgatctagagtttaagagctatgctggaaacagcatagcaagtttaaataaggctagtccgttatcaacttgaaaaagtggcaccgagtcggtgc

SEQ ID NO: 1232 - RNA, 105 nt, synthetic construct
  misc_feature 1..105: note = gRNAPOU2F2_a
  source 1..105: mol_type = other RNA
atggttcactccagcatgggtttaagagctatgctggaaacagcatagcaagtttaaataaggctagtccgttatcaacttgaaaaagtggcaccgagtcggtgc

SEQ ID NO: 1233 - RNA, 105 nt, synthetic construct
  misc_feature 1..105: note = gRNAPOU3F1_a
  source 1..105: mol_type = other RNA
gcccgcagacggagcggaggtttaagagctatgctggaaacagcatagcaagtttaaataaggctagtccgttatcaacttgaaaaagtggcaccgagtcggtgc

SEQ ID NO: 1234 - RNA, 105 nt, synthetic construct
  misc_feature 1..105: note = gRNAPOU3F2_a
  source 1..105: mol_type = other RNA
agtccggctccgagagtcagtttaagagctatgctggaaacagcatagcaagtttaaataaggctagtccgttatcaacttgaaaaagtggcaccgagtcggtgc

SEQ ID NO: 1235 - RNA, 105 nt, synthetic construct
  misc_feature 1..105: note = gRNAPOU3F3_b
  source 1..105: mol_type = other RNA
gctgttccccggcaggtaggtttaagagctatgctggaaacagcatagcaagtttaaataaggctagtccgttatcaacttgaaaaagtggcaccgagtcggtgc

SEQ ID NO: 1236 - RNA, 105 nt, synthetic construct
  misc_feature 1..105: note = gRNAPOU5F1_a
  source 1..105: mol_type = other RNA
aggcaagtgagcttcgacggtttaagagctatgctggaaacagcatagcaagtttaaataaggctagtccgttatcaacttgaaaaagtggcaccgagtcggtgc

SEQ ID NO: 1237 - RNA, 105 nt, synthetic construct
  misc_feature 1..105: note = gRNAPRDM1_a
  source 1..105: mol_type = other RNA
gcctctccgcaacactggagtttaagagctatgctggaaacagcatagcaagtttaaataaggctagtccgttatcaacttgaaaaagtggcaccgagtcggtgc

SEQ ID NO: 1238 - RNA, 105 nt, synthetic construct
  misc_feature 1..105: note = gRNAPRDM16_b
  source 1..105: mol_type = other RNA
gccgacaccatgcgatccagtttaagagctatgctggaaacagcatagcaagtttaaataaggctagtccgttatcaacttgaaaaagtggcaccgagtcggtgc

SEQ ID NO: 1239 - RNA, 105 nt, synthetic construct
  misc_feature 1..105: note = gRNAPRDM7_a
  source 1..105: mol_type = other RNA
gcgaagccagactcccagcgtttaagagctatgctggaaacagcatagcaagtttaaataaggctagtccgttatcaacttgaaaaagtggcaccgagtcggtgc

SEQ ID NO: 1240 - RNA, 105 nt, synthetic construct
  misc_feature 1..105: note = gRNAPRR12_a
  source 1..105: mol_type = other RNA
tcctcctcctctgcgctcagtttaagagctatgctggaaacagcatagcaagtttaaataaggctagtccgttatcaacttgaaaaagtggcaccgagtcggtgc

SEQ ID NO: 1241 - RNA, 105 nt, synthetic construct
  misc_feature 1..105: note = gRNAPRRX1_a
  source 1..105: mol_type = other RNA
gcggccgcttggacagcccgtttaagagctatgctggaaacagcatagcaagtttaaataaggctagtccgttatcaacttgaaaaagtggcaccgagtcggtgc

SEQ ID NO: 1242 - RNA, 105 nt, synthetic construct
  misc_feature 1..105: note = gRNARBCK1_a
  source 1..105: mol_type = other RNA
aggccccagttcttcgcaagtttaagagctatgctggaaacagcatagcaagtttaaataaggctagtccgttatcaacttgaaaaagtggcaccgagtcggtgc

SEQ ID NO: 1243 - RNA, 105 nt, synthetic construct
  misc_feature 1..105: note = gRNARHOXF1_a
  source 1..105: mol_type = other RNA
gaagaaaagggccaatagggtttaagagctatgctggaaacagcatagcaagtttaaataaggctagtccgttatcaacttgaaaaagtggcaccgagtcggtgc

SEQ ID NO: 1244 - RNA, 105 nt, synthetic construct
  misc_feature 1..105: note = gRNARUNX2_a
  source 1..105: mol_type = other RNA
ctgactctgttggtctcgggtttaagagctatgctggaaacagcatagcaagtttaaataaggctagtccgttatcaacttgaaaaagtggcaccgagtcggtgc

SEQ ID NO: 1245 - RNA, 105 nt, synthetic construct
  misc_feature 1..105: note = gRNASALL3_a
  source 1..105: mol_type = other RNA
ggatgcgcgcgtccgggaggtttaagagctatgctggaaacagcatagcaagtttaaataaggctagtccgttatcaacttgaaaaagtggcaccgagtcggtgc

SEQ ID NO: 1246 - RNA, 105 nt, synthetic construct
  misc_feature 1..105: note = gRNASIM1_a
  source 1..105: mol_type = other RNA
gttcactattattcctaatgtttaagagctatgctggaaacagcatagcaagtttaaataaggctagtccgttatcaacttgaaaaagtggcaccgagtcggtgc

SEQ ID NO: 1247 - RNA, 105 nt, synthetic construct
  misc_feature 1..105: note = gRNASIX1_a
  source 1..105: mol_type = other RNA
ggcaactagcagcatccacgtttaagagctatgctggaaacagcatagcaagtttaaataaggctagtccgttatcaacttgaaaaagtggcaccgagtcggtgc

SEQ ID NO: 1248 - RNA, 105 nt, synthetic construct
  misc_feature 1..105: note = gRNASIX6_a
  source 1..105: mol_type = other RNA
gggagcggacgaccccgacgtttaagagctatgctggaaacagcatagcaagtttaaataaggctagtccgttatcaacttgaaaaagtggcaccgagtcggtgc

SEQ ID NO: 1249 - RNA, 105 nt, synthetic construct
  misc_feature 1..105: note = gRNASKI_a
  source 1..105: mol_type = other RNA
tggatgtggcgccgggcccgtttaagagctatgctggaaacagcatagcaagtttaaataaggctagtccgttatcaacttgaaaaagtggcaccgagtcggtgc

SEQ ID NO: 1250 - RNA, 105 nt, synthetic construct
  misc_feature 1..105: note = gRNASKIL_a
  source 1..105: mol_type = other RNA
tcgctaggcgggtgttccagtttaagagctatgctggaaacagcatagcaagtttaaataaggctagtccgttatcaacttgaaaaagtggcaccgagtcggtgc

SEQ ID NO: 1251 - RNA, 105 nt, synthetic construct
  misc_feature 1..105: note = gRNASKOR1_a
  source 1..105: mol_type = other RNA
cgccatgcgctccaggcttgtttaagagctatgctggaaacagcatagcaagtttaaataaggctagtccgttatcaacttgaaaaagtggcaccgagtcggtgc

SEQ ID NO: 1252 - RNA, 105 nt, synthetic construct
  misc_feature 1..105: note = gRNASMAD2_a
  source 1..105: mol_type = other RNA
ggaccccccggatctgacggtttaagagctatgctggaaacagcatagcaagtttaaataaggctagtccgttatcaacttgaaaaagtggcaccgagtcggtgc

SEQ ID NO: 1253 - RNA, 105 nt, synthetic construct
  misc_feature 1..105: note = gRNASMAD5_a
  source 1..105: mol_type = other RNA
cgcgggcgaggggaactgggtttaagagctatgctggaaacagcatagcaagtttaaataaggctagtccgttatcaacttgaaaaagtggcaccgagtcggtgc

SEQ ID NO: 1254 - RNA, 105 nt, synthetic construct
  misc_feature 1..105: note = gRNASMYD3_a
  source 1..105: mol_type = other RNA
tacgcacccgagaaggcaggtttaagagctatgctggaaacagcatagcaagtttaaataaggctagtccgttatcaacttgaaaaagtggcaccgagtcggtgc

SEQ ID NO: 1255 - RNA, 105 nt, synthetic construct
  misc_feature 1..105: note = gRNASNAPC2_a
  source 1..105: mol_type = other RNA
gcgcctgcctctttctgaggtttaagagctatgctggaaacagcatagcaagtttaaataaggctagtccgttatcaacttgaaaaagtggcaccgagtcggtgc

SEQ ID NO: 1256 - RNA, 105 nt, synthetic construct
  misc_feature 1..105: note = gRNASOX1_a
  source 1..105: mol_type = other RNA
gagcatagacggccggggtgtttaagagctatgctggaaacagcatagcaagtttaaataaggctagtccgttatcaacttgaaaaagtggcaccgagtcggtgc

SEQ ID NO: 1257 - RNA, 105 nt, synthetic construct
  misc_feature 1..105: note = gRNASOX14_a
  source 1..105: mol_type = other RNA
cgaggggagcgcagaacccgtttaagagctatgctggaaacagcatagcaagtttaaataaggctagtccgttatcaacttgaaaaagtggcaccgagtcggtgc

SEQ ID NO: 1258 - RNA, 105 nt, synthetic construct
  misc_feature 1..105: note = gRNASOX30_a
  source 1..105: mol_type = other RNA
catccgccgtggtgagaccgtttaagagctatgctggaaacagcatagcaagtttaaataaggctagtccgttatcaacttgaaaaagtggcaccgagtcggtgc

SEQ ID NO: 1259 - RNA, 105 nt, synthetic construct
  misc_feature 1..105: note = gRNASOX5_a
  source 1..105: mol_type = other RNA
ggtcgcttggaagacatccgtttaagagctatgctggaaacagcatagcaagtttaaataaggctagtccgttatcaacttgaaaaagtggcaccgagtcggtgc

SEQ ID NO: 1260 - RNA, 105 nt, synthetic construct
  misc_feature 1..105: note = gRNASOX6_a
  source 1..105: mol_type = other RNA
aatggagaggtggcttgctgtttaagagctatgctggaaacagcatagcaagtttaaataaggctagtccgttatcaacttgaaaaagtggcaccgagtcggtgc

SEQ ID NO: 1261 - RNA, 105 nt, synthetic construct
  misc_feature 1..105: note = gRNASP2_a
  source 1..105: mol_type = other RNA
aggaagatgtcgtaatgaggtttaagagctatgctggaaacagcatagcaagtttaaataaggctagtccgttatcaacttgaaaaagtggcaccgagtcggtgc

SEQ ID NO: 1262 - RNA, 105 nt, synthetic construct
  misc_feature 1..105: note = gRNASP3_a
  source 1..105: mol_type = other RNA
tagcggccagcagagcgaggtttaagagctatgctggaaacagcatagcaagtttaaataaggctagtccgttatcaacttgaaaaagtggcaccgagtcggtgc

SEQ ID NO: 1263 - RNA, 105 nt, synthetic construct
  misc_feature 1..105: note = gRNASP5_a
  source 1..105: mol_type = other RNA
gcgcggcgaggggcaaggggtttaagagctatgctggaaacagcatagcaagtttaaataaggctagtccgttatcaacttgaaaaagtggcaccgagtcggtgc

SEQ ID NO: 1264 - RNA, 105 nt, synthetic construct
  misc_feature 1..105: note = gRNASP8_a
  source 1..105: mol_type = other RNA
aaaaagatcctctgagagggtttaagagctatgctggaaacagcatagcaagtttaaataaggctagtccgttatcaacttgaaaaagtggcaccgagtcggtgc

SEQ ID NO: 1265 - RNA, 105 nt, synthetic construct
  misc_feature 1..105: note = gRNASP9_a
  source 1..105: mol_type = other RNA
ctatggccacgtctatactgtttaagagctatgctggaaacagcatagcaagtttaaataaggctagtccgttatcaacttgaaaaagtggcaccgagtcggtgc

SEQ ID NO: 1266 - RNA, 105 nt, synthetic construct
  misc_feature 1..105: note = gRNASPIB_1
  source 1..105: mol_type = other RNA
gaggctgcacagtaagtgagtttaagagctatgctggaaacagcatagcaagtttaaataaggctagtccgttatcaacttgaaaaagtggcaccgagtcggtgc

SEQ ID NO: 1267 - RNA, 105 nt, synthetic construct
  misc_feature 1..105: note = gRNASTAT5B_a
  source 1..105: mol_type = other RNA
gcggcgcggccctgacggggtttaagagctatgctggaaacagcatagcaagtttaaataaggctagtccgttatcaacttgaaaaagtggcaccgagtcggtgc

SEQ ID NO: 1268 - RNA, 105 nt, synthetic construct
  misc_feature 1..105: note = gRNAT_a
  source 1..105: mol_type = other RNA
ccggcgtcgggtgtccccggtttaagagctatgctggaaacagcatagcaagtttaaataaggctagtccgttatcaacttgaaaaagtggcaccgagtcggtgc

SEQ ID NO: 1269 - RNA, 105 nt, synthetic construct
  misc_feature 1..105: note = gRNATBPL1_a
  source 1..105: mol_type = other RNA
tattgtcgcggggaagctggtttaagagctatgctggaaacagcatagcaagtttaaataaggctagtccgttatcaacttgaaaaagtggcaccgagtcggtgc

SEQ ID NO: 1270 - RNA, 105 nt, synthetic construct
  misc_feature 1..105: note = gRNATBX5_a
  source 1..105: mol_type = other RNA
gtacctcccagctcaaggtgtttaagagctatgctggaaacagcatagcaagtttaaataaggctagtccgttatcaacttgaaaaagtggcaccgagtcggtgc

SEQ ID NO: 1271 - RNA, 105 nt, synthetic construct
  misc_feature 1..105: note = gRNATBX6_a
  source 1..105: mol_type = other RNA
tcgcgccagggtttcccgagtttaagagctatgctggaaacagcatagcaagtttaaataaggctagtccgttatcaacttgaaaaagtggcaccgagtcggtgc

SEQ ID NO: 1272 - RNA, 105 nt, synthetic construct
  misc_feature 1..105: note = gRNATCF12_a
  source 1..105: mol_type = other RNA
ccccccgaatagaacttgtgtttaagagctatgctggaaacagcatagcaagtttaaataaggctagtccgttatcaacttgaaaaagtggcaccgagtcggtgc

SEQ ID NO: 1273 - RNA, 105 nt, synthetic construct
  misc_feature 1..105: note = gRNATCF23_a
  source 1..105: mol_type = other RNA
aggacaaggcaggacccgtgtttaagagctatgctggaaacagcatagcaagtttaaataaggctagtccgttatcaacttgaaaaagtggcaccgagtcggtgc

SEQ ID NO: 1274 - RNA, 105 nt, synthetic construct
  misc_feature 1..105: note = gRNATCF3_a
  source 1..105: mol_type = other RNA
tagcgggccggagccgacggtttaagagctatgctggaaacagcatagcaagtttaaataaggctagtccgttatcaacttgaaaaagtggcaccgagtcggtgc

SEQ ID NO: 1275 - RNA, 105 nt, synthetic construct
  misc_feature 1..105: note = gRNATFAP2A_a
  source 1..105: mol_type = other RNA
ccgccgctaagaaaagagggtttaagagctatgctggaaacagcatagcaagtttaaataaggctagtccgttatcaacttgaaaaagtggcaccgagtcggtgc

SEQ ID NO: 1276 - RNA, 105 nt, synthetic construct
  misc_feature 1..105: note = gRNATFAP2A_b
  source 1..105: mol_type = other RNA
ccagagagtagctccacttgtttaagagctatgctggaaacagcatagcaagtttaaataaggctagtccgttatcaacttgaaaaagtggcaccgagtcggtgc

SEQ ID NO: 1277 - RNA, 105 nt, synthetic construct
  misc_feature 1..105: note = gRNATFAP2E_a
  source 1..105: mol_type = other RNA
ccatggaggcaggacggacgtttaagagctatgctggaaacagcatagcaagtttaaataaggctagtccgttatcaacttgaaaaagtggcaccgagtcggtgc

SEQ ID NO: 1278 - RNA, 105 nt, synthetic construct
  misc_feature 1..105: note = gRNATFDP2_a
  source 1..105: mol_type = other RNA
agtctttgttaccattcaggtttaagagctatgctggaaacagcatagcaagtttaaataaggctagtccgttatcaacttgaaaaagtggcaccgagtcggtgc

SEQ ID NO: 1279 - RNA, 105 nt, synthetic construct
  misc_feature 1..105: note = gRNATFDP3_a
  source 1..105: mol_type = other RNA
ggtgtgaacggccacgggggtttaagagctatgctggaaacagcatagcaagtttaaataaggctagtccgttatcaacttgaaaaagtggcaccgagtcggtgc

SEQ ID NO: 1280 - RNA, 105 nt, synthetic construct
  misc_feature 1..105: note = gRNATGIF2_a
  source 1..105: mol_type = other RNA
tccctgtcggagagatcgggtttaagagctatgctggaaacagcatagcaagtttaaataaggctagtccgttatcaacttgaaaaagtggcaccgagtcggtgc

SEQ ID NO: 1281 - RNA, 105 nt, synthetic construct
  misc_feature 1..105: note = gRNATGIF2LX_a
  source 1..105: mol_type = other RNA
atatggaggccgctgcggagtttaagagctatgctggaaacagcatagcaagtttaaataaggctagtccgttatcaacttgaaaaagtggcaccgagtcggtgc

SEQ ID NO: 1282 - RNA, 105 nt, synthetic construct
  misc_feature 1..105: note = gRNATHAP6_a
  source 1..105: mol_type = other RNA
caggctccccgccaccggagtttaagagctatgctggaaacagcatagcaagtttaaataaggctagtccgttatcaacttgaaaaagtggcaccgagtcggtgc

SEQ ID NO: 1283 - RNA, 105 nt, synthetic construct
  misc_feature 1..105: note = gRNATHRA_a
  source 1..105: mol_type = other RNA
tgctgggggcgtccatggggtttaagagctatgctggaaacagcatagcaagtttaaataaggctagtccgttatcaacttgaaaaagtggcaccgagtcggtgc

SEQ ID NO: 1284 - RNA, 105 nt, synthetic construct
  misc_feature 1..105: note = gRNATIGD1_a
  source 1..105: mol_type = other RNA
cgggcgggtcacaaggaccgtttaagagctatgctggaaacagcatagcaagtttaaataaggctagtccgttatcaacttgaaaaagtggcaccgagtcggtgc

SEQ ID NO: 1285 - RNA, 105 nt, synthetic construct
  misc_feature 1..105: note = gRNATIGD3_a
  source 1..105: mol_type = other RNA
ggcggcgacagcagaacaggtttaagagctatgctggaaacagcatagcaagtttaaataaggctagtccgttatcaacttgaaaaagtggcaccgagtcggtgc

SEQ ID NO: 1286 - RNA, 105 nt, synthetic construct
  misc_feature 1..105: note = gRNATIGD5_a
  source 1..105: mol_type = other RNA
ccatcgagcgcgtcaaggggtttaagagctatgctggaaacagcatagcaagtttaaataaggctagtccgttatcaacttgaaaaagtggcaccgagtcggtgc

SEQ ID NO: 1287 - RNA, 105 nt, synthetic construct
  misc_feature 1..105: note = gRNATLX3_a
  source 1..105: mol_type = other RNA
ccgacggcgccagctacctgtttaagagctatgctggaaacagcatagcaagtttaaataaggctagtccgttatcaacttgaaaaagtggcaccgagtcggtgc

SEQ ID NO: 1288 - RNA, 105 nt, synthetic construct
  misc_feature 1..105: note = gRNATOX_a
  source 1..105: mol_type = other RNA
cggaacagagtgaggtgtcgtttaagagctatgctggaaacagcatagcaagtttaaataaggctagtccgttatcaacttgaaaaagtggcaccgagtcggtgc

SEQ ID NO: 1289 - RNA, 105 nt, synthetic construct
  misc_feature 1..105: note = gRNATOX2_a
  source 1..105: mol_type = other RNA
cgcgggcgccgaggggtacgtttaagagctatgctggaaacagcatagcaagtttaaataaggctagtccgttatcaacttgaaaaagtggcaccgagtcggtgc

SEQ ID NO: 1290 - RNA, 105 nt, synthetic construct
  misc_feature 1..105: note = gRNATRIM27_a
  source 1..105: mol_type = other RNA
gctctcgcttagggggcacgtttaagagctatgctggaaacagcatagcaagtttaaataaggctagtccgttatcaacttgaaaaagtggcaccgagtcggtgc

SEQ ID NO: 1291 - RNA, 105 nt, synthetic construct
  misc_feature 1..105: note = gRNATRIM27_a
  source 1..105: mol_type = other RNA
aggctcgcggccacgctaggtttaagagctatgctggaaacagcatagcaagtttaaataaggctagtccgttatcaacttgaaaaagtggcaccgagtcggtgc

SEQ ID NO: 1292 - RNA, 105 nt, synthetic construct
  misc_feature 1..105: note = gRNATRIM40_a
  source 1..105: mol_type = other RNA
aatttcagatcatcttctcgtttaagagctatgctggaaacagcatagcaagtttaaataaggctagtccgttatcaacttgaaaaagtggcaccgagtcggtgc

SEQ ID NO: 1293 - RNA, 105 nt, synthetic construct
  misc_feature 1..105: note = gRNATRIM52_a
  source 1..105: mol_type = other RNA
tagccagcggctgcatctggtttaagagctatgctggaaacagcatagcaagtttaaataaggctagtccgttatcaacttgaaaaagtggcaccgagtcggtgc

SEQ ID NO: 1294 - RNA, 105 nt, synthetic construct
  misc_feature 1..105: note = gRNATSHZ2_a
  source 1..105: mol_type = other RNA
acacacacaagacagggcggtttaagagctatgctggaaacagcatagcaagtttaaataaggctagtccgttatcaacttgaaaaagtggcaccgagtcggtgc

SEQ ID NO: 1295 - RNA, 105 nt, synthetic construct
  misc_feature 1..105: note = gRNAVAX1_a
  source 1..105: mol_type = other RNA
tgtccccagcctggcgatcgtttaagagctatgctggaaacagcatagcaagtttaaataaggctagtccgttatcaacttgaaaaagtggcaccgagtcggtgc

SEQ ID NO: 1296 - RNA, 105 nt, synthetic construct
  misc_feature 1..105: note = gRNAVEGFA_a
  source 1..105: mol_type = other RNA
ccgggtagctcggaggtcggtttaagagctatgctggaaacagcatagcaagtttaaataaggctagtccgttatcaacttgaaaaagtggcaccgagtcggtgc

SEQ ID NO: 1297 - RNA, 105 nt, synthetic construct
  misc_feature 1..105: note = gRNAVSX1_a
  source 1..105: mol_type = other RNA
atagcatgggatcatgctcgtttaagagctatgctggaaacagcatagcaagtttaaataaggctagtccgttatcaacttgaaaaagtggcaccgagtcggtgc

SEQ ID NO: 1298 - RNA, 105 nt, synthetic construct
  misc_feature 1..105: note = gRNAVSX1_b
  source 1..105: mol_type = other RNA
cagcgtgatggccgagtacgtttaagagctatgctggaaacagcatagcaagtttaaataaggctagtccgttatcaacttgaaaaagtggcaccgagtcggtgc

SEQ ID NO: 1299 - RNA, 105 nt, synthetic construct
  misc_feature 1..105: note = gRNAWNT1_a
  source 1..105: mol_type = other RNA
gctcgcggtcccggctggtgtttaagagctatgctggaaacagcatagcaagtttaaataaggctagtccgttatcaacttgaaaaagtggcaccgagtcggtgc

SEQ ID NO: 1300 - RNA, 105 nt, synthetic construct
  misc_feature 1..105: note = gRNAWNT3A_a
  source 1..105: mol_type = other RNA
gctcactcaccaccagatcgtttaagagctatgctggaaacagcatagcaagtttaaataaggctagtccgttatcaacttgaaaaagtggcaccgagtcggtgc

SEQ ID NO: 1301 - RNA, 105 nt, synthetic construct
  misc_feature 1..105: note = gRNAYBX1_a
  source 1..105: mol_type = other RNA
tcgaactagcgagaatggcgtttaagagctatgctggaaacagcatagcaagtttaaataaggctagtccgttatcaacttgaaaaagtggcaccgagtcggtgc

SEQ ID NO: 1302 - RNA, 105 nt, synthetic construct
  misc_feature 1..105: note = gRNAYY1_a
  source 1..105: mol_type = other RNA
gcggctgcagagcgatcatgtttaagagctatgctggaaacagcatagcaagtttaaataaggctagtccgttatcaacttgaaaaagtggcaccgagtcggtgc

SEQ ID NO: 1303 - RNA, 105 nt, synthetic construct
  misc_feature 1..105: note = gRNAYY2_a
  source 1..105: mol_type = other RNA
agagaaaggcgcgagactggtttaagagctatgctggaaacagcatagcaagtttaaataaggctagtccgttatcaacttgaaaaagtggcaccgagtcggtgc

SEQ ID NO: 1304 - RNA, 105 nt, synthetic construct
  misc_feature 1..105: note = gRNAYY2_b
  source 1..105: mol_type = other RNA
aggaaggggcgagctgcaggtttaagagctatgctggaaacagcatagcaagtttaaataaggctagtccgttatcaacttgaaaaagtggcaccgagtcggtgc

SEQ ID NO: 1305 - RNA, 105 nt, synthetic construct
  misc_feature 1..105: note = gRNAZBED5_a
  source 1..105: mol_type = other RNA
cagctcagggatatcgcctgtttaagagctatgctggaaacagcatagcaagtttaaataaggctagtccgttatcaacttgaaaaagtggcaccgagtcggtgc

SEQ ID NO: 1306 - RNA, 105 nt, synthetic construct
  misc_feature 1..105: note = gRNAZBED5_b
  source 1..105: mol_type = other RNA
atctctatggagatggcctgtttaagagctatgctggaaacagcatagcaagtttaaataaggctagtccgttatcaacttgaaaaagtggcaccgagtcggtgc

SEQ ID NO: 1307 - RNA, 105 nt, synthetic construct
  misc_feature 1..105: note = gRNAZBTB2_a
  source 1..105: mol_type = other RNA
gtgtggaggaggcgcctctgtttaagagctatgctggaaacagcatagcaagtttaaataaggctagtccgttatcaacttgaaaaagtggcaccgagtcggtgc

SEQ ID NO: 1308 - RNA, 105 nt, synthetic construct
  misc_feature 1..105: note = gRNAZBTB21_a
  source 1..105: mol_type = other RNA
gatggaatcacagcggcaggtttaagagctatgctggaaacagcatagcaagtttaaataaggctagtccgttatcaacttgaaaaagtggcaccgagtcggtgc

SEQ ID NO: 1309 - RNA, 105 nt, synthetic construct
  misc_feature 1..105: note = gRNAZBTB38_a
  source 1..105: mol_type = other RNA
cacgggtccggaagcaccagtttaagagctatgctggaaacagcatagcaagtttaaataaggctagtccgttatcaacttgaaaaagtggcaccgagtcggtgc

SEQ ID NO: 1310 - RNA, 105 nt, synthetic construct
  misc_feature 1..105: note = gRNAZBTB4_a
  source 1..105: mol_type = other RNA
cgcctgcgcaggcccgcaagtttaagagctatgctggaaacagcatagcaagtttaaataaggctagtccgttatcaacttgaaaaagtggcaccgagtcggtgc

SEQ ID NO: 1311 - RNA, 105 nt, synthetic construct
  misc_feature 1..105: note = gRNAZBTB40_a
  source 1..105: mol_type = other RNA
cgccggagacgccagaagggtttaagagctatgctggaaacagcatagcaagtttaaataaggctagtccgttatcaacttgaaaaagtggcaccgagtcggtgc

SEQ ID NO: 1312 - RNA, 105 nt, synthetic construct
  misc_feature 1..105: note = gRNAZBTB42_a
  source 1..105: mol_type = other RNA
gccgggaagggcgcttcgtgtttaagagctatgctggaaacagcatagcaagtttaaataaggctagtccgttatcaacttgaaaaagtggcaccgagtcggtgc

SEQ ID NO: 1313 - RNA, 105 nt, synthetic construct
  misc_feature 1..105: note = gRNAZBTB49_a
  source 1..105: mol_type = other RNA
tctgtgccgggcatcacaggtttaagagctatgctggaaacagcatagcaagtttaaataaggctagtccgttatcaacttgaaaaagtggcaccgagtcggtgc

SEQ ID NO: 1314 - RNA, 105 nt, synthetic construct
  misc_feature 1..105: note = gRNAZBTB7B_a
  source 1..105: mol_type = other RNA
gcggccttctgaccaggacgtttaagagctatgctggaaacagcatagcaagtttaaataaggctagtccgttatcaacttgaaaaagtggcaccgagtcggtgc

SEQ ID NO: 1315 - RNA, 105 nt, synthetic construct
  misc_feature 1..105: note = gRNAZBTB7B_b
  source 1..105: mol_type = other RNA
agcagggccccaagcccccgtttaagagctatgctggaaacagcatagcaagtttaaataaggctagtccgttatcaacttgaaaaagtggcaccgagtcggtgc

SEQ ID NO: 1316 - RNA, 105 nt, synthetic construct
  misc_feature 1..105: note = gRNAZBTB7C_c
  source 1..105: mol_type = other RNA
cgccacgagactctgacaggtttaagagctatgctggaaacagcatagcaagtttaaataaggctagtccgttatcaacttgaaaaagtggcaccgagtcggtgc

SEQ ID NO: 1317 - RNA, 105 nt, synthetic construct
  misc_feature 1..105: note = gRNAZBTB8B_a
  source 1..105: mol_type = other RNA
gtcggtgcgcggtgctccggtttaagagctatgctggaaacagcatagcaagtttaaataaggctagtccgttatcaacttgaaaaagtggcaccgagtcggtgc

SEQ ID NO: 1318 - RNA, 105 nt, synthetic construct
  misc_feature 1..105: note = gRNAZBTB9_a
  source 1..105: mol_type = other RNA
gtcggcgggaaggacaatcgtttaagagctatgctggaaacagcatagcaagtttaaataaggctagtccgttatcaacttgaaaaagtggcaccgagtcggtgc

SEQ ID NO: 1319 - RNA, 105 nt, synthetic construct
  misc_feature 1..105: note = gRNAZC3H8_a
  source 1..105: mol_type = other RNA
acccgagagagtgacaaccgtttaagagctatgctggaaacagcatagcaagtttaaataaggctagtccgttatcaacttgaaaaagtggcaccgagtcggtgc

SEQ ID NO: 1320 - RNA, 105 nt, synthetic construct
  misc_feature 1..105: note = gRNAZEB2_a
  source 1..105: mol_type = other RNA
cctcgccaagagtgtcggggtttaagagctatgctggaaacagcatagcaagtttaaataaggctagtccgttatcaacttgaaaaagtggcaccgagtcggtgc

SEQ ID NO: 1321 - RNA, 105 nt, synthetic construct
  misc_feature 1..105: note = gRNAZFHX2_a
  source 1..105: mol_type = other RNA
ctctacctaaagctgaactgtttaagagctatgctggaaacagcatagcaagtttaaataaggctagtccgttatcaacttgaaaaagtggcaccgagtcggtgc

SEQ ID NO: 1322 - RNA, 105 nt, synthetic construct
  misc_feature 1..105: note = gRNAZFHX3_a
  source 1..105: mol_type = other RNA
tgccgccgagcagcatggtgtttaagagctatgctggaaacagcatagcaagtttaaataaggctagtccgttatcaacttgaaaaagtggcaccgagtcggtgc

SEQ ID NO: 1323 - RNA, 105 nt, synthetic construct
  misc_feature 1..105: note = gRNAZFP28_a
  source 1..105: mol_type = other RNA
gcctcgggtgacatgcggggtttaagagctatgctggaaacagcatagcaagtttaaataaggctagtccgttatcaacttgaaaaagtggcaccgagtcggtgc

SEQ ID NO: 1324 - RNA, 105 nt, synthetic construct
  misc_feature 1..105: note = gRNAZFP41_a
  source 1..105: mol_type = other RNA
ccggtgcctagggccgacggtttaagagctatgctggaaacagcatagcaagtttaaataaggctagtccgttatcaacttgaaaaagtggcaccgagtcggtgc

SEQ ID NO: 1325 - RNA, 105 nt, synthetic construct
  misc_feature 1..105: note = gRNAZFP69B_a
  source 1..105: mol_type = other RNA
ctgcagcggtgggaaggcggtttaagagctatgctggaaacagcatagcaagtttaaataaggctagtccgttatcaacttgaaaaagtggcaccgagtcggtgc

SEQ ID NO: 1326 - RNA, 105 nt, synthetic construct
  misc_feature 1..105: note = gRNAZFP90_a
  source 1..105: mol_type = other RNA
gcaaggcgcgaaacccaccgtttaagagctatgctggaaacagcatagcaagtttaaataaggctagtccgttatcaacttgaaaaagtggcaccgagtcggtgc

SEQ ID NO: 1327 - RNA, 105 nt, synthetic construct
  misc_feature 1..105: note = gRNAZGLP1_a
  source 1..105: mol_type = other RNA
taaaggccccacctagctcgtttaagagctatgctggaaacagcatagcaagtttaaataaggctagtccgttatcaacttgaaaaagtggcaccgagtcggtgc

SEQ ID NO: 1328 - RNA, 105 nt, synthetic construct
  misc_feature 1..105: note = gRNAZHX3_a
  source 1..105: mol_type = other RNA
ggagccgcggactgctgaggtttaagagctatgctggaaacagcatagcaagtttaaataaggctagtccgttatcaacttgaaaaagtggcaccgagtcggtgc

SEQ ID NO: 1329 - RNA, 105 nt, synthetic construct
  misc_feature 1..105: note = gRNAZIC5_a
  source 1..105: mol_type = other RNA
gctacaccaccaccaacaggtttaagagctatgctggaaacagcatagcaagtttaaataaggctagtccgttatcaacttgaaaaagtggcaccgagtcggtgc

SEQ ID NO: 1330 - RNA, 105 nt, synthetic construct
  misc_feature 1..105: note = gRNAZKSCAN1_a
  source 1..105: mol_type = other RNA
gagggcctaagtccgtgtggtttaagagctatgctggaaacagcatagcaagtttaaataaggctagtccgttatcaacttgaaaaagtggcaccgagtcggtgc

SEQ ID NO: 1331 - RNA, 105 nt, synthetic construct
  misc_feature 1..105: note = gRNAZKSCAN1_b
  source 1..105: mol_type = other RNA
ggccgaagggcaccgcacagtttaagagctatgctggaaacagcatagcaagtttaaataaggctagtccgttatcaacttgaaaaagtggcaccgagtcggtgc

SEQ ID NO: 1332 - RNA, 105 nt, synthetic construct
  misc_feature 1..105: note = gRNAZKSCAN2_a
  source 1..105: mol_type = other RNA
cagggctcgcagggggcaggtttaagagctatgctggaaacagcatagcaagtttaaataaggctagtccgttatcaacttgaaaaagtggcaccgagtcggtgc

SEQ ID NO: 1333 - RNA, 105 nt, synthetic construct
  misc_feature 1..105: note = gRNAZKSCAN7_a
  source 1..105: mol_type = other RNA
ccgcgtctcggcccactcggtttaagagctatgctggaaacagcatagcaagtttaaataaggctagtccgttatcaacttgaaaaagtggcaccgagtcggtgc

SEQ ID NO: 1334 - RNA, 105 nt, synthetic construct
  misc_feature 1..105: note = gRNAZNF107_a
  source 1..105: mol_type = other RNA
agccacagccacttccgatgtttaagagctatgctggaaacagcatagcaagtttaaataaggctagtccgttatcaacttgaaaaagtggcaccgagtcggtgc

SEQ ID NO: 1335 - RNA, 105 nt, synthetic construct
  misc_feature 1..105: note = gRNAZNF121_a
  source 1..105: mol_type = other RNA
tcccagtcaggagccaggtgtttaagagctatgctggaaacagcatagcaagtttaaataaggctagtccgttatcaacttgaaaaagtggcaccgagtcggtgc

SEQ ID NO: 1336 - RNA, 105 nt, synthetic construct
  misc_feature 1..105: note = gRNAZNF132_a
  source 1..105: mol_type = other RNA
agcaaaatgaggaccgcaagtttaagagctatgctggaaacagcatagcaagtttaaataaggctagtccgttatcaacttgaaaaagtggcaccgagtcggtgc

SEQ ID NO: 1337 - RNA, 105 nt, synthetic construct
  misc_feature 1..105: note = gRNAZNF135_a
  source 1..105: mol_type = other RNA
ctttgtctcgcagtcaggagtttaagagctatgctggaaacagcatagcaagtttaaataaggctagtccgttatcaacttgaaaaagtggcaccgagtcggtgc

SEQ ID NO: 1338 - RNA, 105 nt, synthetic construct
  misc_feature 1..105: note = gRNAZNF135_b
  source 1..105: mol_type = other RNA
agggtgagctaggccggcggtttaagagctatgctggaaacagcatagcaagtttaaataaggctagtccgttatcaacttgaaaaagtggcaccgagtcggtgc

SEQ ID NO: 1339 - RNA, 105 nt, synthetic construct
  misc_feature 1..105: note = gRNAZNF140_a
  source 1..105: mol_type = other RNA
cgttgcctacagccaacacgtttaagagctatgctggaaacagcatagcaagtttaaataaggctagtccgttatcaacttgaaaaagtggcaccgagtcggtgc

SEQ ID NO: 1340 - RNA, 105 nt, synthetic construct
  misc_feature 1..105: note = gRNAZNF141_a
  source 1..105: mol_type = other RNA
agctgtggccgaatcaccagtttaagagctatgctggaaacagcatagcaagtttaaataaggctagtccgttatcaacttgaaaaagtggcaccgagtcggtgc

SEQ ID NO: 1341 - RNA, 105 nt, synthetic construct
  misc_feature 1..105: note = gRNAZNF222_a
  source 1..105: mol_type = other RNA
ggttgcgagccccaaggaagtttaagagctatgctggaaacagcatagcaagtttaaataaggctagtccgttatcaacttgaaaaagtggcaccgagtcggtgc

SEQ ID NO: 1342 - RNA, 105 nt, synthetic construct
  misc_feature 1..105: note = gRNAZNF225_a
  source 1..105: mol_type = other RNA
caacctcacagtaacggaggtttaagagctatgctggaaacagcatagcaagtttaaataaggctagtccgttatcaacttgaaaaagtggcaccgagtcggtgc

SEQ ID NO: 1343 - RNA, 105 nt, synthetic construct
  misc_feature 1..105: note = gRNAZNF229_a
  source 1..105: mol_type = other RNA
aggccatgggaattaggatgtttaagagctatgctggaaacagcatagcaagtttaaataaggctagtccgttatcaacttgaaaaagtggcaccgagtcggtgc

SEQ ID NO: 1344 - RNA, 105 nt, synthetic construct
  misc_feature 1..105: note = gRNAZNF230_a
  source 1..105: mol_type = other RNA
tcgttgcgaccccaagcgagtttaagagctatgctggaaacagcatagcaagtttaaataaggctagtccgttatcaacttgaaaaagtggcaccgagtcggtgc

SEQ ID NO: 1345 - RNA, 105 nt, synthetic construct
  misc_feature 1..105: note = gRNAZNF248_a
  source 1..105: mol_type = other RNA
tgcaggagccgtctccctcgtttaagagctatgctggaaacagcatagcaagtttaaataaggctagtccgttatcaacttgaaaaagtggcaccgagtcggtgc

SEQ ID NO: 1346 - RNA, 105 nt, synthetic construct
  misc_feature 1..105: note = gRNAZNF25_a
  source 1..105: mol_type = other RNA
accaggcggctcccacccagtttaagagctatgctggaaacagcatagcaagtttaaataaggctagtccgttatcaacttgaaaaagtggcaccgagtcggtgc

SEQ ID NO: 1347 - RNA, 105 nt, synthetic construct
  misc_feature 1..105: note = gRNAZNF26_a
  source 1..105: mol_type = other RNA
acacccgctggccagattcgtttaagagctatgctggaaacagcatagcaagtttaaataaggctagtccgttatcaacttgaaaaagtggcaccgagtcggtgc

SEQ ID NO: 1348 - RNA, 105 nt, synthetic construct
  misc_feature 1..105: note = gRNAZNF267_a
  source 1..105: mol_type = other RNA
tacatcacctcaaataaaagtttaagagctatgctggaaacagcatagcaagtttaaataaggctagtccgttatcaacttgaaaaagtggcaccgagtcggtgc

SEQ ID NO: 1349 - RNA, 105 nt, synthetic construct
  misc_feature 1..105: note = gRNAZNF280C_a
  source 1..105: mol_type = other RNA
tggggttcggataaggagggtttaagagctatgctggaaacagcatagcaagtttaaataaggctagtccgttatcaacttgaaaaagtggcaccgagtcggtgc

SEQ ID NO: 1350 - RNA, 105 nt, synthetic construct
  misc_feature 1..105: note = gRNAZNF281_a
  source 1..105: mol_type = other RNA
gacccgtaagtattgccgggtttaagagctatgctggaaacagcatagcaagtttaaataaggctagtccgttatcaacttgaaaaagtggcaccgagtcggtgc

SEQ ID NO: 1351 - RNA, 105 nt, synthetic construct
  misc_feature 1..105: note = gRNAZNF283_a
  source 1..105: mol_type = other RNA
accttaaggacaccggaaagtttaagagctatgctggaaacagcatagcaagtttaaataaggctagtccgttatcaacttgaaaaagtggcaccgagtcggtgc

SEQ ID NO: 1352 - RNA, 105 nt, synthetic construct
  misc_feature 1..105: note = gRNAZNF286B_a
  source 1..105: mol_type = other RNA
gtgctgctctcattccgccgtttaagagctatgctggaaacagcatagcaagtttaaataaggctagtccgttatcaacttgaaaaagtggcaccgagtcggtgc

SEQ ID NO: 1353 - RNA, 105 nt, synthetic construct
  misc_feature 1..105: note = gRNAZNF304_a
  source 1..105: mol_type = other RNA
caaccagaatgcacggaccgtttaagagctatgctggaaacagcatagcaagtttaaataaggctagtccgttatcaacttgaaaaagtggcaccgagtcggtgc

SEQ ID NO: 1354 - RNA, 105 nt, synthetic construct
  misc_feature 1..105: note = gRNAZNF317_a
  source 1..105: mol_type = other RNA
atcgggggagcggaggtgagtttaagagctatgctggaaacagcatagcaagtttaaataaggctagtccgttatcaacttgaaaaagtggcaccgagtcggtgc

SEQ ID NO: 1355 - RNA, 105 nt, synthetic construct
  misc_feature 1..105: note = gRNAZNF317_b
  source 1..105: mol_type = other RNA
gacacgaggggtccccaacgtttaagagctatgctggaaacagcatagcaagtttaaataaggctagtccgttatcaacttgaaaaagtggcaccgagtcggtgc

SEQ ID NO: 1356 - RNA, 105 nt, synthetic construct
  misc_feature 1..105: note = gRNAZNF318_a
  source 1..105: mol_type = other RNA
cacggcgacagctctgaccgtttaagagctatgctggaaacagcatagcaagtttaaataaggctagtccgttatcaacttgaaaaagtggcaccgagtcggtgc

SEQ ID NO: 1357 - RNA, 105 nt, synthetic construct
  misc_feature 1..105: note = gRNAZNF320_a
  source 1..105: mol_type = other RNA
agccgccgagagcgacggtgtttaagagctatgctggaaacagcatagcaagtttaaataaggctagtccgttatcaacttgaaaaagtggcaccgagtcggtgc

SEQ ID NO: 1358 - RNA, 105 nt, synthetic construct
  misc_feature 1..105: note = gRNAZNF33B_a
  source 1..105: mol_type = other RNA
aggaactggcgtagcgtccgtttaagagctatgctggaaacagcatagcaagtttaaataaggctagtccgttatcaacttgaaaaagtggcaccgagtcggtgc

SEQ ID NO: 1359 - RNA, 105 nt, synthetic construct
  misc_feature 1..105: note = gRNAZNF346_a
  source 1..105: mol_type = other RNA
caggccgcggacggcggaggtttaagagctatgctggaaacagcatagcaagtttaaataaggctagtccgttatcaacttgaaaaagtggcaccgagtcggtgc

SEQ ID NO: 1360 - RNA, 105 nt, synthetic construct
  misc_feature 1..105: note = gRNAZNF358_a
  source 1..105: mol_type = other RNA
cgctcccggggagcgagaggtttaagagctatgctggaaacagcatagcaagtttaaataaggctagtccgttatcaacttgaaaaagtggcaccgagtcggtgc

SEQ ID NO: 1361 - RNA, 105 nt, synthetic construct
  misc_feature 1..105: note = gRNAZNF367_a
  source 1..105: mol_type = other RNA
tgtaacgcgggaaaagccggtttaagagctatgctggaaacagcatagcaagtttaaataaggctagtccgttatcaacttgaaaaagtggcaccgagtcggtgc

SEQ ID NO: 1362 - RNA, 105 nt, synthetic construct
  misc_feature 1..105: note = gRNAZNF382_a
  source 1..105: mol_type = other RNA
cacggacgcagccacagaagtttaagagctatgctggaaacagcatagcaagtttaaataaggctagtccgttatcaacttgaaaaagtggcaccgagtcggtgc

SEQ ID NO: 1363 - RNA, 105 nt, synthetic construct
  misc_feature 1..105: note = gRNAZNF383_a
  source 1..105: mol_type = other RNA
caagggtaggggaagtgcggtttaagagctatgctggaaacagcatagcaagtttaaataaggctagtccgttatcaacttgaaaaagtggcaccgagtcggtgc

SEQ ID NO: 1364 - RNA, 105 nt, synthetic construct
  misc_feature 1..105: note = gRNAZNF385B_a
  source 1..105: mol_type = other RNA
cggcgcgcgagagtggcgtgtttaagagctatgctggaaacagcatagcaagtttaaataaggctagtccgttatcaacttgaaaaagtggcaccgagtcggtgc

SEQ ID NO: 1365 - RNA, 105 nt, synthetic construct
  misc_feature 1..105: note = gRNAZNF385B_b
  source 1..105: mol_type = other RNA
gcccggcgcgggcaagagtgtttaagagctatgctggaaacagcatagcaagtttaaataaggctagtccgttatcaacttgaaaaagtggcaccgagtcggtgc

SEQ ID NO: 1366 - RNA, 105 nt, synthetic construct
  misc_feature 1..105: note = gRNAZNF391_a
  source 1..105: mol_type = other RNA
cccgcccggggtgtgtcgggtttaagagctatgctggaaacagcatagcaagtttaaataaggctagtccgttatcaacttgaaaaagtggcaccgagtcggtgc

SEQ ID NO: 1367 - RNA, 105 nt, synthetic construct
  misc_feature 1..105: note = gRNAZNF415_a
  source 1..105: mol_type = other RNA
aacggatcgcgttgggtgagtttaagagctatgctggaaacagcatagcaagtttaaataaggctagtccgttatcaacttgaaaaagtggcaccgagtcggtgc

SEQ ID NO: 1368 - RNA, 105 nt, synthetic construct
  misc_feature 1..105: note = gRNAZNF423_a
  source 1..105: mol_type = other RNA
ccttgcctggggaggatgagtttaagagctatgctggaaacagcatagcaagtttaaataaggctagtccgttatcaacttgaaaaagtggcaccgagtcggtgc

SEQ ID NO: 1369 - RNA, 105 nt, synthetic construct
  misc_feature 1..105: note = gRNAZNF43_a
  source 1..105: mol_type = other RNA
ctccggcacgcgcagattggtttaagagctatgctggaaacagcatagcaagtttaaataaggctagtccgttatcaacttgaaaaagtggcaccgagtcggtgc

SEQ ID NO: 1370 - RNA, 105 nt, synthetic construct
  misc_feature 1..105: note = gRNAZNF43_b
  source 1..105: mol_type = other RNA
cagctctgcagccgcaacggtttaagagctatgctggaaacagcatagcaagtttaaataaggctagtccgttatcaacttgaaaaagtggcaccgagtcggtgc

SEQ ID NO: 1371 - RNA, 105 nt, synthetic construct
  misc_feature 1..105: note = gRNAZNF432_a
  source 1..105: mol_type = other RNA
cagggcgtggaaacgtggtgtttaagagctatgctggaaacagcatagcaagtttaaataaggctagtccgttatcaacttgaaaaagtggcaccgagtcggtgc

SEQ ID NO: 1372 - RNA, 105 nt, synthetic construct
  misc_feature 1..105: note = gRNAZNF433_a
  source 1..105: mol_type = other RNA
caggcggcgagctgaggttgtttaagagctatgctggaaacagcatagcaagtttaaataaggctagtccgttatcaacttgaaaaagtggcaccgagtcggtgc

SEQ ID NO: 1373 - RNA, 105 nt, synthetic construct
  misc_feature 1..105: note = gRNAZNF436_a
  source 1..105: mol_type = other RNA
tcagaaaccacaggctcatgtttaagagctatgctggaaacagcatagcaagtttaaataaggctagtccgttatcaacttgaaaaagtggcaccgagtcggtgc

SEQ ID NO: 1374 - RNA, 105 nt, synthetic construct
  misc_feature 1..105: note = gRNAZNF441_a
  source 1..105: mol_type = other RNA
aatcaggcgcactgaccgggtttaagagctatgctggaaacagcatagcaagtttaaataaggctagtccgttatcaacttgaaaaagtggcaccgagtcggtgc

SEQ ID NO: 1375 - RNA, 105 nt, synthetic construct
  misc_feature 1..105: note = gRNAZNF441_b
  source 1..105: mol_type = other RNA
cgtgcggccgagggaaccggtttaagagctatgctggaaacagcatagcaagtttaaataaggctagtccgttatcaacttgaaaaagtggcaccgagtcggtgc

SEQ ID NO: 1376 - RNA, 105 nt, synthetic construct
  misc_feature 1..105: note = gRNAZNF443_a
  source 1..105: mol_type = other RNA
ggagctgtcggtaggacctgtttaagagctatgctggaaacagcatagcaagtttaaataaggctagtccgttatcaacttgaaaaagtggcaccgagtcggtgc

SEQ ID NO: 1377 - RNA, 105 nt, synthetic construct
  misc_feature 1..105: note = gRNAZNF461_a
  source 1..105: mol_type = other RNA
aggaatggtctccgggtaggtttaagagctatgctggaaacagcatagcaagtttaaataaggctagtccgttatcaacttgaaaaagtggcaccgagtcggtgc

SEQ ID NO: 1378 - RNA, 105 nt, synthetic construct
  misc_feature 1..105: note = gRNAZNF462_a
  source 1..105: mol_type = other RNA
tgccgggtctcagcaatgggtttaagagctatgctggaaacagcatagcaagtttaaataaggctagtccgttatcaacttgaaaaagtggcaccgagtcggtgc

SEQ ID NO: 1379 - RNA, 105 nt, synthetic construct
  misc_feature 1..105: note = gRNAZNF468_a
  source 1..105: mol_type = other RNA
aaacgtatacattgccctagtttaagagctatgctggaaacagcatagcaagtttaaataaggctagtccgttatcaacttgaaaaagtggcaccgagtcggtgc

SEQ ID NO: 1380 - RNA, 105 nt, synthetic construct
  misc_feature 1..105: note = gRNAZNF473_a
  source 1..105: mol_type = other RNA
ctgcgaggaggcgcgtgtggtttaagagctatgctggaaacagcatagcaagtttaaataaggctagtccgttatcaacttgaaaaagtggcaccgagtcggtgc

SEQ ID NO: 1381 - RNA, 105 nt, synthetic construct
  misc_feature 1..105: note = gRNAZNF483_a
  source 1..105: mol_type = other RNA
cggatgctgatgcaggtacgtttaagagctatgctggaaacagcatagcaagtttaaataaggctagtccgttatcaacttgaaaaagtggcaccgagtcggtgc

SEQ ID NO: 1382 - RNA, 105 nt, synthetic construct
  misc_feature 1..105: note = gRNAZNF486_a
  source 1..105: mol_type = other RNA
tcgctgcatctggagctctgtttaagagctatgctggaaacagcatagcaagtttaaataaggctagtccgttatcaacttgaaaaagtggcaccgagtcggtgc

SEQ ID NO: 1383 - RNA, 105 nt, synthetic construct
  misc_feature 1..105: note = gRNAZNF491_a
  source 1..105: mol_type = other RNA
gactggatgcagaacgcaagtttaagagctatgctggaaacagcatagcaagtttaaataaggctagtccgttatcaacttgaaaaagtggcaccgagtcggtgc

SEQ ID NO: 1384 - RNA, 105 nt, synthetic construct
  misc_feature 1..105: note = gRNAZNF507_a
  source 1..105: mol_type = other RNA
tggagctccggatgaggaggtttaagagctatgctggaaacagcatagcaagtttaaataaggctagtccgttatcaacttgaaaaagtggcaccgagtcggtgc

SEQ ID NO: 1385 - RNA, 105 nt, synthetic construct
  misc_feature 1..105: note = gRNAZNF514_a
  source 1..105: mol_type = other RNA
agaggcaggcagtacttcagtttaagagctatgctggaaacagcatagcaagtttaaataaggctagtccgttatcaacttgaaaaagtggcaccgagtcggtgc

SEQ ID NO: 1386 - RNA, 105 nt, synthetic construct
  misc_feature 1..105: note = gRNAZNF519_a
  source 1..105: mol_type = other RNA
cacagagcgacggagtgaggtttaagagctatgctggaaacagcatagcaagtttaaataaggctagtccgttatcaacttgaaaaagtggcaccgagtcggtgc

SEQ ID NO: 1387 - RNA, 105 nt, synthetic construct
  misc_feature 1..105: note = gRNAZNF519_b
  source 1..105: mol_type = other RNA
cagccagagcgcggggttagtttaagagctatgctggaaacagcatagcaagtttaaataaggctagtccgttatcaacttgaaaaagtggcaccgagtcggtgc

SEQ ID NO: 1388 - RNA, 105 nt, synthetic construct
  misc_feature 1..105: note = gRNAZNF540_a
  source 1..105: mol_type = other RNA
acgggccctagcggcttgggtttaagagctatgctggaaacagcatagcaagtttaaataaggctagtccgttatcaacttgaaaaagtggcaccgagtcggtgc

SEQ ID NO: 1389 - RNA, 105 nt, synthetic construct
  misc_feature 1..105: note = gRNAZNF543_a
  source 1..105: mol_type = other RNA
gctggacgcgcctacccaggtttaagagctatgctggaaacagcatagcaagtttaaataaggctagtccgttatcaacttgaaaaagtggcaccgagtcggtgc

SEQ ID NO: 1390 - RNA, 105 nt, synthetic construct
  misc_feature 1..105: note = gRNAZNF546_a
  source 1..105: mol_type = other RNA
gcaatgtaaagggcccttggtttaagagctatgctggaaacagcatagcaagtttaaataaggctagtccgttatcaacttgaaaaagtggcaccgagtcggtgc

SEQ ID NO: 1391 - RNA, 105 nt, synthetic construct
  misc_feature 1..105: note = gRNAZNF549_a
  source 1..105: mol_type = other RNA
gccggaaacgcccagcccggtttaagagctatgctggaaacagcatagcaagtttaaataaggctagtccgttatcaacttgaaaaagtggcaccgagtcggtgc

SEQ ID NO: 1392 - RNA, 105 nt, synthetic construct
  misc_feature 1..105: note = gRNAZNF555_a
  source 1..105: mol_type = other RNA
gccagggaccgctaggggcgtttaagagctatgctggaaacagcatagcaagtttaaataaggctagtccgttatcaacttgaaaaagtggcaccgagtcggtgc

SEQ ID NO: 1393 - RNA, 105 nt, synthetic construct
  misc_feature 1..105: note = gRNAZNF562_a
  source 1..105: mol_type = other RNA
caccacaataaaggttaaagtttaagagctatgctggaaacagcatagcaagtttaaataaggctagtccgttatcaacttgaaaaagtggcaccgagtcggtgc

SEQ ID NO: 1394 - RNA, 105 nt, synthetic construct
  misc_feature 1..105: note = gRNAZNF567_a
  source 1..105: mol_type = other RNA
cggccggcaaccgaaggtggtttaagagctatgctggaaacagcatagcaagtttaaataaggctagtccgttatcaacttgaaaaagtggcaccgagtcggtgc

SEQ ID NO: 1395 - RNA, 105 nt, synthetic construct
  misc_feature 1..105: note = gRNAZNF569_a
  source 1..105: mol_type = other RNA
gtctcggtccgttacaccagtttaagagctatgctggaaacagcatagcaagtttaaataaggctagtccgttatcaacttgaaaaagtggcaccgagtcggtgc

SEQ ID NO: 1396 - RNA, 105 nt, synthetic construct
  misc_feature 1..105: note = gRNAZNF574_a
  source 1..105: mol_type = other RNA
actgaggtagtgactgagggtttaagagctatgctggaaacagcatagcaagtttaaataaggctagtccgttatcaacttgaaaaagtggcaccgagtcggtgc

SEQ ID NO: 1397 - RNA, 105 nt, synthetic construct
  misc_feature 1..105: note = gRNAZNF577_a
  source 1..105: mol_type = other RNA
gcagtgtgtggggttcgcggtttaagagctatgctggaaacagcatagcaagtttaaataaggctagtccgttatcaacttgaaaaagtggcaccgagtcggtgc

SEQ ID NO: 1398 - RNA, 105 nt, synthetic construct
  misc_feature 1..105: note = gRNAZNF596_a
  source 1..105: mol_type = other RNA
ccgcaggaagggaactgcggtttaagagctatgctggaaacagcatagcaagtttaaataaggctagtccgttatcaacttgaaaaagtggcaccgagtcggtgc

SEQ ID NO: 1399 - RNA, 105 nt, synthetic construct
  misc_feature 1..105: note = gRNAZNF610_a
  source 1..105: mol_type = other RNA
aagcgcggggcaggacgttgtttaagagctatgctggaaacagcatagcaagtttaaataaggctagtccgttatcaacttgaaaaagtggcaccgagtcggtgc

SEQ ID NO: 1400 - RNA, 105 nt, synthetic construct
  misc_feature 1..105: note = gRNAZNF616_a
  source 1..105: mol_type = other RNA
cccctccaggcgtcgacaagtttaagagctatgctggaaacagcatagcaagtttaaataaggctagtccgttatcaacttgaaaaagtggcaccgagtcggtgc

SEQ ID NO: 1401 - RNA, 105 nt, synthetic construct
  misc_feature 1..105: note = gRNAZNF621_a
  source 1..105: mol_type = other RNA
cacggtccgggtgaaggaggtttaagagctatgctggaaacagcatagcaagtttaaataaggctagtccgttatcaacttgaaaaagtggcaccgagtcggtgc

SEQ ID NO: 1402 - RNA, 105 nt, synthetic construct
  misc_feature 1..105: note = gRNAZNF626_a
  source 1..105: mol_type = other RNA
tgggagagacgccacgctggtttaagagctatgctggaaacagcatagcaagtttaaataaggctagtccgttatcaacttgaaaaagtggcaccgagtcggtgc

SEQ ID NO: 1403 - RNA, 105 nt, synthetic construct
  misc_feature 1..105: note = gRNAZNF627_a
  source 1..105: mol_type = other RNA
acgcgagcccgggtggggagtttaagagctatgctggaaacagcatagcaagtttaaataaggctagtccgttatcaacttgaaaaagtggcaccgagtcggtgc

SEQ ID NO: 1404 - RNA, 105 nt, synthetic construct
  misc_feature 1..105: note = gRNAZNF629_a
  source 1..105: mol_type = other RNA
cttctcaaggggtgattccgtttaagagctatgctggaaacagcatagcaagtttaaataaggctagtccgttatcaacttgaaaaagtggcaccgagtcggtgc

SEQ ID NO: 1405 - RNA, 105 nt, synthetic construct
  misc_feature 1..105: note = gRNAZNF630_a
  source 1..105: mol_type = other RNA
cactcacccggacaagtcggtttaagagctatgctggaaacagcatagcaagtttaaataaggctagtccgttatcaacttgaaaaagtggcaccgagtcggtgc

SEQ ID NO: 1406 - RNA, 105 nt, synthetic construct
  misc_feature 1..105: note = gRNAZNF630_a
  source 1..105: mol_type = other RNA
atcctacgaaagcagtgtggtttaagagctatgctggaaacagcatagcaagtttaaataaggctagtccgttatcaacttgaaaaagtggcaccgagtcggtgc

SEQ ID NO: 1407 - RNA, 105 nt, synthetic construct
  misc_feature 1..105: note = gRNAZNF641_a
  source 1..105: mol_type = other RNA
cggcggagccagcgacagggtttaagagctatgctggaaacagcatagcaagtttaaataaggctagtccgttatcaacttgaaaaagtggcaccgagtcggtgc

SEQ ID NO: 1408 - RNA, 105 nt, synthetic construct
  misc_feature 1..105: note = gRNAZNF645_a
  source 1..105: mol_type = other RNA
cacattcttgttcaccagcgtttaagagctatgctggaaacagcatagcaagtttaaataaggctagtccgttatcaacttgaaaaagtggcaccgagtcggtgc

SEQ ID NO: 1409 - RNA, 105 nt, synthetic construct
  misc_feature 1..105: note = gRNAZNF658_a
  source 1..105: mol_type = other RNA
accaaagaggtcgttgtgagtttaagagctatgctggaaacagcatagcaagtttaaataaggctagtccgttatcaacttgaaaaagtggcaccgagtcggtgc

SEQ ID NO: 1410 - RNA, 105 nt, synthetic construct
  misc_feature 1..105: note = gRNAZNF660_a
  source 1..105: mol_type = other RNA
gctacgaggagtcagagacgtttaagagctatgctggaaacagcatagcaagtttaaataaggctagtccgttatcaacttgaaaaagtggcaccgagtcggtgc

SEQ ID NO: 1411 - RNA, 105 nt, synthetic construct
  misc_feature 1..105: note = gRNAZNF662_a
  source 1..105: mol_type = other RNA
tggagtcggggtcttactcgtttaagagctatgctggaaacagcatagcaagtttaaataaggctagtccgttatcaacttgaaaaagtggcaccgagtcggtgc

SEQ ID NO: 1412 - RNA, 105 nt, synthetic construct
  misc_feature 1..105: note = gRNAZNF677_a
  source 1..105: mol_type = other RNA
gcgagatccgcttccgggtgtttaagagctatgctggaaacagcatagcaagtttaaataaggctagtccgttatcaacttgaaaaagtggcaccgagtcggtgc

SEQ ID NO: 1413 - RNA, 105 nt, synthetic construct
  misc_feature 1..105: note = gRNAZNF682_a
  source 1..105: mol_type = other RNA
gactccagtccgcagactcgtttaagagctatgctggaaacagcatagcaagtttaaataaggctagtccgttatcaacttgaaaaagtggcaccgagtcggtgc

SEQ ID NO: 1414 - RNA, 105 nt, synthetic construct
  misc_feature 1..105: note = gRNAZNF697_a
  source 1..105: mol_type = other RNA
gccccaggggagcggacaagtttaagagctatgctggaaacagcatagcaagtttaaataaggctagtccgttatcaacttgaaaaagtggcaccgagtcggtgc

SEQ ID NO: 1415 - RNA, 105 nt, synthetic construct
  misc_feature 1..105: note = gRNAZNF703_a
  source 1..105: mol_type = other RNA
tgctagccggggccagcgggtttaagagctatgctggaaacagcatagcaagtttaaataaggctagtccgttatcaacttgaaaaagtggcaccgagtcggtgc

SEQ ID NO: 1416 - RNA, 105 nt, synthetic construct
  misc_feature 1..105: note = gRNAZNF705A_a
  source 1..105: mol_type = other RNA
tgagtatattcaggaggatgtttaagagctatgctggaaacagcatagcaagtttaaataaggctagtccgttatcaacttgaaaaagtggcaccgagtcggtgc

SEQ ID NO: 1417 - RNA, 105 nt, synthetic construct
  misc_feature 1..105: note = gRNAZNF705B_a
  source 1..105: mol_type = other RNA
tagccccagttggccctacgtttaagagctatgctggaaacagcatagcaagtttaaataaggctagtccgttatcaacttgaaaaagtggcaccgagtcggtgc

SEQ ID NO: 1418 - RNA, 105 nt, synthetic construct
  misc_feature 1..105: note = gRNAZNF705G_a
  source 1..105: mol_type = other RNA
ttggaacacccaggcaggggtttaagagctatgctggaaacagcatagcaagtttaaataaggctagtccgttatcaacttgaaaaagtggcaccgagtcggtgc

SEQ ID NO: 1419 - RNA, 105 nt, synthetic construct
  misc_feature 1..105: note = gRNAZNF716_a
  source 1..105: mol_type = other RNA
ggacgcttccgtaaggttagtttaagagctatgctggaaacagcatagcaagtttaaataaggctagtccgttatcaacttgaaaaagtggcaccgagtcggtgc

SEQ ID NO: 1420 - RNA, 105 nt, synthetic construct
  misc_feature 1..105: note = gRNAZNF729_a
  source 1..105: mol_type = other RNA
cgagatgggaaagaactccgtttaagagctatgctggaaacagcatagcaagtttaaataaggctagtccgttatcaacttgaaaaagtggcaccgagtcggtgc

SEQ ID NO: 1421 - RNA, 105 nt, synthetic construct
  misc_feature 1..105: note = gRNAZNF750_a
  source 1..105: mol_type = other RNA
tgggctccgaggattactcgtttaagagctatgctggaaacagcatagcaagtttaaataaggctagtccgttatcaacttgaaaaagtggcaccgagtcggtgc

SEQ ID NO: 1422 - RNA, 105 nt, synthetic construct
  misc_feature 1..105: note = gRNAZNF75A_a
  source 1..105: mol_type = other RNA
ctggctctgtacctggacagtttaagagctatgctggaaacagcatagcaagtttaaataaggctagtccgttatcaacttgaaaaagtggcaccgagtcggtgc

SEQ ID NO: 1423 - RNA, 105 nt, synthetic construct
  misc_feature 1..105: note = gRNAZNF765_a
  source 1..105: mol_type = other RNA
actgggaggcgctcagggagtttaagagctatgctggaaacagcatagcaagtttaaataaggctagtccgttatcaacttgaaaaagtggcaccgagtcggtgc

SEQ ID NO: 1424 - RNA, 105 nt, synthetic construct
  misc_feature 1..105: note = gRNAZNF771_a
  source 1..105: mol_type = other RNA
tcggcgacctggagctctggtttaagagctatgctggaaacagcatagcaagtttaaataaggctagtccgttatcaacttgaaaaagtggcaccgagtcggtgc

SEQ ID NO: 1425 - RNA, 105 nt, synthetic construct
  misc_feature 1..105: note = gRNAZNF773_a
  source 1..105: mol_type = other RNA
ggaagctggttgttcgctggtttaagagctatgctggaaacagcatagcaagtttaaataaggctagtccgttatcaacttgaaaaagtggcaccgagtcggtgc

SEQ ID NO: 1426 - RNA, 105 nt, synthetic construct
  misc_feature 1..105: note = gRNAZNF773_b
  source 1..105: mol_type = other RNA
gcaagctgagttctcttgagtttaagagctatgctggaaacagcatagcaagtttaaataaggctagtccgttatcaacttgaaaaagtggcaccgagtcggtgc

SEQ ID NO: 1427 - RNA, 105 nt, synthetic construct
  misc_feature 1..105: note = gRNAZNF773_c
  source 1..105: mol_type = other RNA
tcgctgcggcgaccagctcgtttaagagctatgctggaaacagcatagcaagtttaaataaggctagtccgttatcaacttgaaaaagtggcaccgagtcggtgc

SEQ ID NO: 1428 - RNA, 105 nt, synthetic construct
  misc_feature 1..105: note = gRNAZNF774_a
  source 1..105: mol_type = other RNA
ggcacagcctcggggttgcgtttaagagctatgctggaaacagcatagcaagtttaaataaggctagtccgttatcaacttgaaaaagtggcaccgagtcggtgc

SEQ ID NO: 1429 - RNA, 105 nt, synthetic construct
  misc_feature 1..105: note = gRNAZNF778_a
  source 1..105: mol_type = other RNA
gacagcccgaggacacgcggtttaagagctatgctggaaacagcatagcaagtttaaataaggctagtccgttatcaacttgaaaaagtggcaccgagtcggtgc

SEQ ID NO: 1430 - RNA, 105 nt, synthetic construct
  misc_feature 1..105: note = gRNAZNF778_b
  source 1..105: mol_type = other RNA
tcccggaccagcttccccggtttaagagctatgctggaaacagcatagcaagtttaaataaggctagtccgttatcaacttgaaaaagtggcaccgagtcggtgc

SEQ ID NO: 1431 - RNA, 105 nt, synthetic construct
  misc_feature 1..105: note = gRNAZNF784_a
  source 1..105: mol_type = other RNA
gctcctgggatcgcgactcgtttaagagctatgctggaaacagcatagcaagtttaaataaggctagtccgttatcaacttgaaaaagtggcaccgagtcggtgc

SEQ ID NO: 1432 - RNA, 105 nt, synthetic construct
  misc_feature 1..105: note = gRNAZNF789_a
  source 1..105: mol_type = other RNA
ggaacagacacaaccactcgtttaagagctatgctggaaacagcatagcaagtttaaataaggctagtccgttatcaacttgaaaaagtggcaccgagtcggtgc

SEQ ID NO: 1433 - RNA, 105 nt, synthetic construct
  misc_feature 1..105: note = gRNAZNF804B_a
  source 1..105: mol_type = other RNA
cgaggtggctgctcaaccggtttaagagctatgctggaaacagcatagcaagtttaaataaggctagtccgttatcaacttgaaaaagtggcaccgagtcggtgc

SEQ ID NO: 1434 - RNA, 105 nt, synthetic construct
  misc_feature 1..105: note = gRNAZNF816_a
  source 1..105: mol_type = other RNA
gagcagattcgcacaaaccgtttaagagctatgctggaaacagcatagcaagtttaaataaggctagtccgttatcaacttgaaaaagtggcaccgagtcggtgc

SEQ ID NO: 1435 - RNA, 105 nt, synthetic construct
  misc_feature 1..105: note = gRNAZNF823_a
  source 1..105: mol_type = other RNA
tcccctgggccgcaagatggtttaagagctatgctggaaacagcatagcaagtttaaataaggctagtccgttatcaacttgaaaaagtggcaccgagtcggtgc

SEQ ID NO: 1436 - RNA, 105 nt, synthetic construct
  misc_feature 1..105: note = gRNAZNF83_a
  source 1..105: mol_type = other RNA
tgaggacgatagaacgattgtttaagagctatgctggaaacagcatagcaagtttaaataaggctagtccgttatcaacttgaaaaagtggcaccgagtcggtgc

SEQ ID NO: 1437 - RNA, 105 nt, synthetic construct
  misc_feature 1..105: note = gRNAZNF83_b
  source 1..105: mol_type = other RNA
cttcatgctacacagtccagtttaagagctatgctggaaacagcatagcaagtttaaataaggctagtccgttatcaacttgaaaaagtggcaccgagtcggtgc

SEQ ID NO: 1438 - RNA, 105 nt, synthetic construct
  misc_feature 1..105: note = gRNAZNF831_a
  source 1..105: mol_type = other RNA
cccgcgccccgctagtgacgtttaagagctatgctggaaacagcatagcaagtttaaataaggctagtccgttatcaacttgaaaaagtggcaccgagtcggtgc

SEQ ID NO: 1439 - RNA, 105 nt, synthetic construct
  misc_feature 1..105: note = gRNAZNF846_a
  source 1..105: mol_type = other RNA
gacgctccggacttctgctgtttaagagctatgctggaaacagcatagcaagtttaaataaggctagtccgttatcaacttgaaaaagtggcaccgagtcggtgc

SEQ ID NO: 1440 - RNA, 105 nt, synthetic construct
  misc_feature 1..105: note = gRNAZNF852_a
  source 1..105: mol_type = other RNA
cgtttggatgattgtctctgtttaagagctatgctggaaacagcatagcaagtttaaataaggctagtccgttatcaacttgaaaaagtggcaccgagtcggtgc

SEQ ID NO: 1441 - RNA, 105 nt, synthetic construct
  misc_feature 1..105: note = gRNAZNF879_a
  source 1..105: mol_type = other RNA
acaccgcacaagaggcgaggtttaagagctatgctggaaacagcatagcaagtttaaataaggctagtccgttatcaacttgaaaaagtggcaccgagtcggtgc

SEQ ID NO: 1442 - RNA, 105 nt, synthetic construct
  misc_feature 1..105: note = gRNAZNF91_a
  source 1..105: mol_type = other RNA
cgctgccgccggagtttccgtttaagagctatgctggaaacagcatagcaagtttaaataaggctagtccgttatcaacttgaaaaagtggcaccgagtcggtgc

SEQ ID NO: 1443 - RNA, 105 nt, synthetic construct
  misc_feature 1..105: note = gRNAZNF93_a
  source 1..105: mol_type = other RNA
aacagggcggcttctggttgtttaagagctatgctggaaacagcatagcaagtttaaataaggctagtccgttatcaacttgaaaaagtggcaccgagtcggtgc

SEQ ID NO: 1444 - RNA, 105 nt, synthetic construct
  misc_feature 1..105: note = gRNAZNF99_a
  source 1..105: mol_type = other RNA
cacagggccacagaggctagtttaagagctatgctggaaacagcatagcaagtttaaataaggctagtccgttatcaacttgaaaaagtggcaccgagtcggtgc

SEQ ID NO: 1445 - RNA, 105 nt, synthetic construct
  misc_feature 1..105: note = gRNAZNF99_a
  source 1..105: mol_type = other RNA
tagtcacagtgcaggaagggtttaagagctatgctggaaacagcatagcaagtttaaataaggctagtccgttatcaacttgaaaaagtggcaccgagtcggtgc

SEQ ID NO: 1446 - RNA, 105 nt, synthetic construct
  misc_feature 1..105: note = gRNAZSCAN16_a
  source 1..105: mol_type = other RNA
cagccttccgggagaggatgtttaagagctatgctggaaacagcatagcaagtttaaataaggctagtccgttatcaacttgaaaaagtggcaccgagtcggtgc

SEQ ID NO: 1447 - RNA, 105 nt, synthetic construct
  misc_feature 1..105: note = gRNAZSCAN2_a
  source 1..105: mol_type = other RNA
cctctccggctcacctctcgtttaagagctatgctggaaacagcatagcaagtttaaataaggctagtccgttatcaacttgaaaaagtggcaccgagtcggtgc

SEQ ID NO: 1448 - RNA, 105 nt, synthetic construct
  misc_feature 1..105: note = gRNAZSCAN21_a
  source 1..105: mol_type = other RNA
tcagagccgctccgggtacgtttaagagctatgctggaaacagcatagcaagtttaaataaggctagtccgttatcaacttgaaaaagtggcaccgagtcggtgc

SEQ ID NO: 1449 - RNA, 105 nt, synthetic construct
  misc_feature 1..105: note = gRNAZSCAN5A_a
  source 1..105: mol_type = other RNA
taactttctcatcaagcttgtttaagagctatgctggaaacagcatagcaagtttaaataaggctagtccgttatcaacttgaaaaagtggcaccgagtcggtgc

SEQ ID NO: 1450 - RNA, 105 nt, synthetic construct
  misc_feature 1..105: note = gRNAZSCAN5A_b
  source 1..105: mol_type = other RNA
tccgcgtcgaggccctacggtttaagagctatgctggaaacagcatagcaagtttaaataaggctagtccgttatcaacttgaaaaagtggcaccgagtcggtgc

SEQ ID NO: 1451 - RNA, 105 nt, synthetic construct
  misc_feature 1..105: note = gRNAZSCAN5B_a
  source 1..105: mol_type = other RNA
attcatgtgccaagtctcagtttaagagctatgctggaaacagcatagcaagtttaaataaggctagtccgttatcaacttgaaaaagtggcaccgagtcggtgc

SEQ ID NO: 1452 - RNA, 105 nt, synthetic construct
  misc_feature 1..105: note = gRNAZSCAN5B_b
  source 1..105: mol_type = other RNA
ggtgagtgtccagcggcgagtttaagagctatgctggaaacagcatagcaagtttaaataaggctagtccgttatcaacttgaaaaagtggcaccgagtcggtgc

SEQ ID NO: 1453 - DNA, 86 bp, Streptococcus pyogenes
  misc_feature 1..86: note = SpCas9 gRNA scaffold sequence (DNA)
  source 1..86: mol_type = unassigned DNA
gtttaagagctatgctggaaacagcatagcaagtttaaataaggctagtccgttatcaacttgaaaaagtggcaccgagtcggtgc

SEQ ID NO: 1454 - RNA, 86 nt, Streptococcus pyogenes
  misc_feature 1..86: note = SpCas9 gRNA scaffold sequence (RNA)
  source 1..86: mol_type = unassigned RNA
gtttaagagctatgctggaaacagcatagcaagtttaaataaggctagtccgttatcaacttgaaaaagtggcaccgagtcggtgc

SEQ ID NO: 1455 - DNA, 4509 bp, synthetic construct
  misc_feature 1..4509: note = VP64-dSpCas9-NLS-VP64 (nt)
  source 1..4509: mol_type = other DNA
gacgcattggacgattttgatctggatatgctgggaagtgacgccctcgatgattttgaccttgacatgcttggttcggatgcccttgatgactttgacctcgacatgctcggcagtgacgcccttgatgatttcgacctggacatggttaacccaaagaagaagcggaaggtcggtatccacggagtcccagcagccgacaagaagtactccattgggctcgccatcggcacaaacagcgtcggctgggccgtcattacggacgagtacaaggtgccgagcaaaaaattcaaagttctgggcaataccgatcgccacagcataaagaagaacctcattggcgccctcctgttcgactccggggaaaccgccgaagccacgcggctcaaaagaacagcacggcgcagatatacccgcagaaagaatcggatctgctacctgcaggagatctttagtaatgagatggctaaggtggatgactctttcttccataggctggaggagtcctttttggtggaggaggataaaaagcacgagcgccacccaatctttggcaatatcgtggacgaggtggcgtaccatgaaaagtacccaaccatatatcatctgaggaagaagcttgtagacagtactgataaggctgacttgcggttgatctatctcgcgctggcgcatatgatcaaatttcggggacacttcctcatcgagggggacctgaacccagacaacagcgatgtcgacaaactctttatccaactggttcagacttacaatcagcttttcgaagagaacccgatcaacgcatccggagttgacgccaaagcaatcctgagcgctaggctgtccaaatcccggcggctcgaaaacctcatcgcacagctccctggggagaagaagaacggcctgtttggtaatcttatcgccctgtcactcgggctgacccccaactttaaatctaacttcgacctggccgaagatgccaagcttcaactgagcaaagacacctacgatgatgatctcgacaatctgctggcccagatcggcgaccagtacgcagacctttttttggcggcaaagaacctgtcagacgccattctgctgagtgatattctgcgagtgaacacggagatcaccaaagctccgctgagcgctagtatgatcaagcgctatgatgagcaccaccaagacttgactttgctgaaggcccttgtcagacagcaactgcctgagaagtacaaggaaattttcttcgatcagtctaaaaatggctacgccggatacattgacggcggagcaagccaggaggaattttacaaatttattaagcccatcttggaaaaaatggacggcaccgaggagctgctggtaaagcttaacagagaagatctgttgcgcaaacagcgcactttcgacaatggaagcatcccccaccagattcacctgggcgaactgcacgctatcctcaggcggcaagaggatttctacccctttttgaaagataacagggaaaagattgagaaaatcctcacatttcggataccctactatgtaggccccctcgcccggggaaattccagattcgcgtggatgactcgcaaatcagaagagaccatcactccctggaacttcgaggaagtcgtggataagggggcctctgcccagtccttcatcgaaaggatgactaactttgataaaaatctgcctaacgaaaaggtgcttcctaaacactctctgctgtacgagtacttcacagtttataacgagctcaccaaggtcaaatacgtcacagaagggatgagaaagccagcattcctgtctggagagcagaagaaagctatcgtggacctcctcttcaagacgaaccggaaagttaccgtgaaacagctcaaagaagactatttcaaaaagattgaatgtttcgactctgttgaaatcagcggagtggaggatcgcttcaacgcatccctgggaacgtatcacgatctcctgaaaatcattaaagacaaggacttcctggacaatgaggagaacgaggacattcttgaggacattgtcctcacccttacgttgtttgaagatagggagatgattgaagaacgcttgaaaacttacgctcatctcttcgacgacaaagtcatgaaacagctcaagaggcgccgatatacaggatgggggcggctgtcaagaaaactgatcaatgggatccgagacaagcagagtggaaagacaatcctggattttcttaagtccgatggatttgccaaccggaacttcatgcagttgatccatgatgactctctcacctttaaggaggacatccagaaagcacaagtttctggccagggggacagtcttcacgagcacatcgctaatcttgcaggtagcccagctatcaaaaagggaatactgcagaccgttaaggtcgtggatgaactcgtcaaagtaatgggaaggcataagcccgagaatatcgttatcgagatggcccgagagaaccaaactacccagaagggacagaagaacagtagggaaaggatgaagaggattgaagagggtataaaagaactggggtcccaaatccttaaggaacacccagttgaaaacacccagcttcagaatgagaagctctacctgtactacctgcagaacggcagggacatgtacgtggatcaggaactggacatcaatcggctctccgactacgacgtggatgccatcgtgccccagtcttttctcaaagatgattctattgataataaagtgttgacaagatccgataaaaatagagggaagagtgataacgtcccctcagaagaagttgtcaagaaaatgaaaaattattggcggcagctgctgaacgccaaactgatcacacaacggaagttcgataatctgactaaggctgaacgaggtggcctgtctgagttggataaagccggcttcatcaaaaggcagcttgttgagacacgccagatcaccaagcacgtggcccaaattctcgattcacgcatgaacaccaagtacgatgaaaatgacaaactgattcgagaggtgaaagttattactctgaagtctaagctggtctcagatttcagaaaggactttcagttttataaggtgagagagatcaacaattaccaccatgcgcatgatgcctacctgaatgcagtggtaggcactgcacttatcaaaaaatatcccaagcttgaatctgaatttgtttacggagactataaagtgtacgatgttaggaaaatgatcgcaaagtctgagcaggaaataggcaaggccaccgctaagtacttcttttacagcaatattatgaattttttcaagaccgagattacactggccaatggagagattcggaagcgaccacttatcgaaacaaacggagaaacaggagaaatcgtgtgggacaagggtagggatttcgcgacagtccggaaggtcctgtccatgccgcaggtgaacatcgttaaaaagaccgaagtacagaccggaggcttctccaaggaaagtatcctcccgaaaaggaacagcgacaagctgatcgcacgcaaaaaagattgggaccccaagaaatacggcggattcgattctcctacagtcgcttacagtgtactggttgtggccaaagtggagaaagggaagtctaaaaaactcaaaagcgtcaaggaactgctgggcatcacaatcatggagcgatcaagcttcgaaaaaaaccccatcgactttctcgaggcgaaaggatataaagaggtcaaaaaagacctcatcattaagcttcccaagtactctctctttgagcttgaaaacggccggaaacgaatgctcgctagtgcgggcgagctgcagaaaggtaacgagctggcactgccctctaaatacgttaatttcttgtatctggccagccactatgaaaagctcaaagggtctcccgaagataatgagcagaagcagctgttcgtggaacaacacaaacactaccttgatgagatcatcgagcaaataagcgaattctccaaaagagtgatcctcgccgacgctaacctcgataaggtgctttctgcttacaataagcacagggataagcccatcagggagcaggcagaaaacattatccacttgtttactctgaccaacttgggcgcgcctgcagccttcaagtacttcgacaccaccatagacagaaagcggtacacctctacaaaggaggtcctggacgccacactgattcatcagtcaattacggggctctatgaaacaagaatcgacctctctcagctcggtggagacaaaaggccggcggccacgaaaaaggccggccaggcaaaaaagaaaaaggctagccgcgccgacgcgctggacgatttcgatctcgacatgctgggttctgatgccctcgatgactttgacctggatatgttgggaagcgacgcattggatgactttgatctggacatgctcggctccgatgctctggacgatttcgatctcgatatgtta

SEQ ID NO: 1456 - protein, 1503 aa, synthetic construct
  REGION 1..1503: note = VP64-dSpCas9-NLS-VP64 (AA)
DALDDFDLDMLGSDALDDFDLDMLGSDALDDFDLDMLGSDALDDFDLDMVNPKKKRKVGIHGVPAADKKYSIGLAIGTNSVGWAVITDEYKVPSKKFKVLGNTDRHSIKKNLIGALLFDSGETAEATRLKRTARRRYTRRKNRICYLQEIFSNEMAKVDDSFFHRLEESFLVEEDKKHERHPIFGNIVDEVAYHEKYPTIYHLRKKLVDSTDKADLRLIYLALAHMIKFRGHFLIEGDLNPDNSDVDKLFIQLVQTYNQLFEENPINASGVDAKAILSARLSKSRRLENLIAQLPGEKKNGLFGNLIALSLGLTPNFKSNFDLAEDAKLQLSKDTYDDDLDNLLAQIGDQYADLFLAAKNLSDAILLSDILRVNTEITKAPLSASMIKRYDEHHQDLTLLKALVRQQLPEKYKEIFFDQSKNGYAGYIDGGASQEEFYKFIKPILEKMDGTEELLVKLNREDLLRKQRTFDNGSIPHQIHLGELHAILRRQEDFYPFLKDNREKIEKILTFRIPYYVGPLARGNSRFAWMTRKSEETITPWNFEEVVDKGASAQSFIERMTNFDKNLPNEKVLPKHSLLYEYFTVYNELTKVKYVTEGMRKPAFLSGEQKKAIVDLLFKTNRKVTVKQLKEDYFKKIECFDSVEISGVEDRFNASLGTYHDLLKIIKDKDFLDNEENEDILEDIVLTLTLFEDREMIEERLKTYAHLFDDKVMKQLKRRRYTGWGRLSRKLINGIRDKQSGKTILDFLKSDGFANRNFMQLIHDDSLTFKEDIQKAQVSGQGDSLHEHIANLAGSPAIKKGILQTVKVVDELVKVMGRHKPENIVIEMARENQTTQKGQKNSRERMKRIEEGIKELGSQILKEHPVENTQLQNEKLYLYYLQNGRDMYVDQELDINRLSDYDVDAIVPQSFLKDDSIDNKVLTRSDKNRGKSDNVPSEEVVKKMKNYWRQLLNAKLITQRKFDNLTKAERGGLSELDKAGFIKRQLVETRQITKHVAQILDSRMNTKYDENDKLIREVKVITLKSKLVSDFRKDFQFYKVREINNYHHAHDAYLNAVVGTALIKKYPKLESEFVYGDYKVYDVRKMIAKSEQEIGKATAKYFFYSNIMNFFKTEITLANGEIRKRPLIETNGETGEIVWDKGRDFATVRKVLSMPQVNIVKKTEVQTGGFSKESILPKRNSDKLIARKKDWDPKKYGGFDSPTVAYSVLVVAKVEKGKSKKLKSVKELLGITIMERSSFEKNPIDFLEAKGYKEVKKDLIIKLPKYSLFELENGRKRMLASAGELQKGNELALPSKYVNFLYLASHYEKLKGSPEDNEQKQLFVEQHKHYLDEIIEQISEFSKRVILADANLDKVLSAYNKHRDKPIREQAENIIHLFTLTNLGAPAAFKYFDTTIDRKRYTSTKEVLDATLIHQSITGLYETRIDLSQLGGDKRPAATKKAGQAKKKKASRADALDDFDLDMLGSDALDDFDLDMLGSDALDDFDLDMLGSDALDDFDLDML

SEQ ID NO: 1457 - DNA, 4509 bp, synthetic construct
  misc_feature 1..4509: note = NLS2-dSpCas9-NLS-KRAB-NLS2 (nt)
  source 1..4509: mol_type = other DNA
ccaaagaagaagcggaaggtcggtatccacggagtcccagcagccgacaagaagtactccattgggctcgccatcggcacaaacagcgtcggctgggccgtcattacggacgagtacaaggtgccgagcaaaaaattcaaagttctgggcaataccgatcgccacagcataaagaagaacctcattggcgccctcctgttcgactccggggaaaccgccgaagccacgcggctcaaaagaacagcacggcgcagatatacccgcagaaagaatcggatctgctacctgcaggagatctttagtaatgagatggctaaggtggatgactctttcttccataggctggaggagtcctttttggtggaggaggataaaaagcacgagcgccacccaatctttggcaatatcgtggacgaggtggcgtaccatgaaaagtacccaaccatatatcatctgaggaagaagcttgtagacagtactgataaggctgacttgcggttgatctatctcgcgctggcgcatatgatcaaatttcggggacacttcctcatcgagggggacctgaacccagacaacagcgatgtcgacaaactctttatccaactggttcagacttacaatcagcttttcgaagagaacccgatcaacgcatccggagttgacgccaaagcaatcctgagcgctaggctgtccaaatcccggcggctcgaaaacctcatcgcacagctccctggggagaagaagaacggcctgtttggtaatcttatcgccctgtcactcgggctgacccccaactttaaatctaacttcgacctggccgaagatgccaagcttcaactgagcaaagacacctacgatgatgatctcgacaatctgctggcccagatcggcgaccagtacgcagacctttttttggcggcaaagaacctgtcagacgccattctgctgagtgatattctgcgagtgaacacggagatcaccaaagctccgctgagcgctagtatgatcaagcgctatgatgagcaccaccaagacttgactttgctgaaggcccttgtcagacagcaactgcctgagaagtacaaggaaattttcttcgatcagtctaaaaatggctacgccggatacattgacggcggagcaagccaggaggaattttacaaatttattaagcccatcttggaaaaaatggacggcaccgaggagctgctggtaaagcttaacagagaagatctgttgcgcaaacagcgcactttcgacaatggaagcatcccccaccagattcacctgggcgaactgcacgctatcctcaggcggcaagaggatttctacccctttttgaaagataacagggaaaagattgagaaaatcctcacatttcggataccctactatgtaggccccctcgcccggggaaattccagattcgcgtggatgactcgcaaatcagaagagaccatcactccctggaacttcgaggaagtcgtggataagggggcctctgcccagtccttcatcgaaaggatgactaactttgataaaaatctgcctaacgaaaaggtgcttcctaaacactctctgctgtacgagtacttcacagtttataacgagctcaccaaggtcaaatacgtcacagaagggatgagaaagccagcattcctgtctggagagcagaagaaagctatcgtggacctcctcttcaagacgaaccggaaagttaccgtgaaacagctcaaagaagactatttcaaaaagattgaatgtttcgactctgttgaaatcagcggagtggaggatcgcttcaacgcatccctgggaacgtatcacgatctcctgaaaatcattaaagacaaggacttcctggacaatgaggagaacgaggacattcttgaggacattgtcctcacccttacgttgtttgaagatagggagatgattgaagaacgcttgaaaacttacgctcatctcttcgacgacaaagtcatgaaacagctcaagaggcgccgatatacaggatgggggcggctgtcaagaaaactgatcaatgggatccgagacaagcagagtggaaagacaatcctggattttcttaagtccgatggatttgccaaccggaacttcatgcagttgatccatgatgactctctcacctttaaggaggacatccagaaagcacaagtttctggccagggggacagtcttcacgagcacatcgctaatcttgcaggtagcccagctatcaaaaagggaatactgcagaccgttaaggtcgtggatgaactcgtcaaagtaatgggaaggcataagcccgagaatatcgttatcgagatggcccgagagaaccaaactacccagaagggacagaagaacagtagggaaaggatgaagaggattgaagagggtataaaagaactggggtcccaaatccttaaggaacacccagttgaaaacacccagcttcagaatgagaagctctacctgtactacctgcagaacggcagggacatgtacgtggatcaggaactggacatcaatcggctctccgactacgacgtggatgccatcgtgccccagtcttttctcaaagatgattctattgataataaagtgttgacaagatccgataaaaatagagggaagagtgataacgtcccctcagaagaagttgtcaagaaaatgaaaaattattggcggcagctgctgaacgccaaactgatcacacaacggaagttcgataatctgactaaggctgaacgaggtggcctgtctgagttggataaagccggcttcatcaaaaggcagcttgttgagacacgccagatcaccaagcacgtggcccaaattctcgattcacgcatgaacaccaagtacgatgaaaatgacaaactgattcgagaggtgaaagttattactctgaagtctaagctggtctcagatttcagaaaggactttcagttttataaggtgagagagatcaacaattaccaccatgcgcatgatgcctacctgaatgcagtggtaggcactgcacttatcaaaaaatatcccaagcttgaatctgaatttgtttacggagactataaagtgtacgatgttaggaaaatgatcgcaaagtctgagcaggaaataggcaaggccaccgctaagtacttcttttacagcaatattatgaattttttcaagaccgagattacactggccaatggagagattcggaagcgaccacttatcgaaacaaacggagaaacaggagaaatcgtgtgggacaagggtagggatttcgcgacagtccggaaggtcctgtccatgccgcaggtgaacatcgttaaaaagaccgaagtacagaccggaggcttctccaaggaaagtatcctcccgaaaaggaacagcgacaagctgatcgcacgcaaaaaagattgggaccccaagaaatacggcggattcgattctcctacagtcgcttacagtgtactggttgtggccaaagtggagaaagggaagtctaaaaaactcaaaagcgtcaaggaactgctgggcatcacaatcatggagcgatcaagcttcgaaaaaaaccccatcgactttctcgaggcgaaaggatataaagaggtcaaaaaagacctcatcattaagcttcccaagtactctctctttgagcttgaaaacggccggaaacgaatgctcgctagtgcgggcgagctgcagaaaggtaacgagctggcactgccctctaaatacgttaatttcttgtatctggccagccactatgaaaagctcaaagggtctcccgaagataatgagcagaagcagctgttcgtggaacaacacaaacactaccttgatgagatcatcgagcaaataagcgaattctccaaaagagtgatcctcgccgacgctaacctcgataaggtgctttctgcttacaataagcacagggataagcccatcagggagcaggcagaaaacattatccacttgtttactctgaccaacttgggcgcgcctgcagccttcaagtacttcgacaccaccatagacagaaagcggtacacctctacaaaggaggtcctggacgccacactgattcatcagtcaattacggggctctatgaaacaagaatcgacctctctcagctcggtggagacaaaaggccggcggccacgaaaaaggccggccaggcaaaaaagaaaaaggctagcgatgctaagtcactgactgcctggtcccggacactggtgaccttcaaggatgtgtttgtggacttcaccagggaggagtggaagctgctggacactgctcagcagatcctgtacagaaatgtgatgctggagaactataagaacctggtttccttgggttatcagcttactaagccagatgtgatcctccggttggagaagggagaagagccctggctggtggagagagaaattcaccaagagacccatcctgattcagagactgcatttgaaatcaaatcatcagttccgaaaaagaaacgcaaagtt

SEQ ID NO: 1458 - protein, 1503 aa, synthetic construct
  REGION 1..1503: note = NLS2-dSpCas9-NLS-KRAB-NLS2 (AA)
PKKKRKVGIHGVPAADKKYSIGLAIGTNSVGWAVITDEYKVPSKKFKVLGNTDRHSIKKNLIGALLFDSGETAEATRLKRTARRRYTRRKNRICYLQEIFSNEMAKVDDSFFHRLEESFLVEEDKKHERHPIFGNIVDEVAYHEKYPTIYHLRKKLVDSTDKADLRLIYLALAHMIKFRGHFLIEGDLNPDNSDVDKLFIQLVQTYNQLFEENPINASGVDAKAILSARLSKSRRLENLIAQLPGEKKNGLFGNLIALSLGLTPNFKSNFDLAEDAKLQLSKDTYDDDLDNLLAQIGDQYADLFLAAKNLSDAILLSDILRVNTEITKAPLSASMIKRYDEHHQDLTLLKALVRQQLPEKYKEIFFDQSKNGYAGYIDGGASQEEFYKFIKPILEKMDGTEELLVKLNREDLLRKQRTFDNGSIPHQIHLGELHAILRRQEDFYPFLKDNREKIEKILTFRIPYYVGPLARGNSRFAWMTRKSEETITPWNFEEVVDKGASAQSFIERMTNFDKNLPNEKVLPKHSLLYEYFTVYNELTKVKYVTEGMRKPAFLSGEQKKAIVDLLFKTNRKVTVKQLKEDYFKKIECFDSVEISGVEDRFNASLGTYHDLLKIIKDKDFLDNEENEDILEDIVLTLTLFEDREMIEERLKTYAHLFDDKVMKQLKRRRYTGWGRLSRKLINGIRDKQSGKTILDFLKSDGFANRNFMQLIHDDSLTFKEDIQKAQVSGQGDSLHEHIANLAGSPAIKKGILQTVKVVDELVKVMGRHKPENIVIEMARENQTTQKGQKNSRERMKRIEEGIKELGSQILKEHPVENTQLQNEKLYLYYLQNGRDMYVDQELDINRLSDYDVDAIVPQSFLKDDSIDNKVLTRSDKNRGKSDNVPSEEVVKKMKNYWRQLLNAKLITQRKFDNLTKAERGGLSELDKAGFIKRQLVETRQITKHVAQILDSRMNTKYDENDKLIREVKVITLKSKLVSDFRKDFQFYKVREINNYHHAHDAYLNAVVGTALIKKYPKLESEFVYGDYKVYDVRKMIAKSEQEIGKATAKYFFYSNIMNFFKTEITLANGEIRKRPLIETNGETGEIVWDKGRDFATVRKVLSMPQVNIVKKTEVQTGGFSKESILPKRNSDKLIARKKDWDPKKYGGFDSPTVAYSVLVVAKVEKGKSKKLKSVKELLGITIMERSSFEKNPIDFLEAKGYKEVKKDLIIKLPKYSLFELENGRKRMLASAGELQKGNELALPSKYVNFLYLASHYEKLKGSPEDNEQKQLFVEQHKHYLDEIIEQISEFSKRVILADANLDKVLSAYNKHRDKPIREQAENIIHLFTLTNLGAPAAFKYFDTTIDRKRYTSTKEVLDATLIHQSITGLYETRIDLSQLGGDKRPAATKKAGQAKKKKASDAKSLTAWSRTLVTFKDVFVDFTREEWKLLDTAQQILYRNVMLENYKNLVSLGYQLTKPDVILRLEKGEEPWLVEREIHQETHPDSETAFEIKSSVPKKKRKV

SEQ ID NO: 1459-1460 - skipped (2 entries)

SEQ ID NO: 1461 - protein, 1053 aa, Staphylococcus aureus
  REGION 1..1053: note = SaCas9 (AA)
MKRNYILGLDIGITSVGYGIIDYETRDVIDAGVRLFKEANVENNEGRRSKRGARRLKRRRRHRIQRVKKLLFDYNLLTDHSELSGINPYEARVKGLSQKLSEEEFSAALLHLAKRRGVHNVNEVEEDTGNELSTKEQISRNSKALEEKYVAELQLERLKKDGEVRGSINRFKTSDYVKEAKQLLKVQKAYHQLDQSFIDTYIDLLETRRTYYEGPGEGSPFGWKDIKEWYEMLMGHCTYFPEELRSVKYAYNADLYNALNDLNNLVITRDENEKLEYYEKFQIIENVFKQKKKPTLKQIAKEILVNEEDIKGYRVTSTGKPEFTNLKVYHDIKDITARKEIIENAELLDQIAKILTIYQSSEDIQEELTNLNSELTQEEIEQISNLKGYTGTHNLSLKAINLILDELWHTNDNQIAIFNRLKLVPKKVDLSQQKEIPTTLVDDFILSPVVKRSFIQSIKVINAIIKKYGLPNDIIIELAREKNSKDAQKMINEMQKRNRQTNERIEEIIRTTGKENAKYLIEKIKLHDMQEGKCLYSLEAIPLEDLLNNPFNYEVDHIIPRSVSFDNSFNNKVLVKQEENSKKGNRTPFQYLSSSDSKISYETFKKHILNLAKGKGRISKTKKEYLLEERDINRFSVQKDFINRNLVDTRYATRGLMNLLRSYFRVNNLDVKVKSINGGFTSFLRRKWKFKKERNKGYKHHAEDALIIANADFIFKEWKKLDKAKKVMENQMFEEKQAESMPEIETEQEYKEIFITPHQIKHIKDFKDYKYSHRVDKKPNRELINDTLYSTRKDDKGNTLIVNNLNGLYDKDNDKLKKLINKSPEKLLMYHHDPQTYQKLKLIMEQYGDEKNPLYKYYEETGNYLTKYSKKDNGPVIKKIKYYGNKLNAHLDITDDYPNSRNKVVKLSLKPYRFDVYLDNGVYKFVTVKNLDVIKKENYYEVNSKCYEEAKKLKKISNQAEFIASFYNNDLIKINGELYRVIGVNNDLLNRIEVNMIDITYREYLENMNDKRPPRIIKTIASKTQSIKKYSTDILGNLYEVKSKKHPQIIKKG

SEQ ID NO: 1462 - protein, 1052 aa, Staphylococcus aureus
  REGION 1..1052: note = dSaCas9 (AA)
KRNYILGLAIGITSVGYGIIDYETRDVIDAGVRLFKEANVENNEGRRSKRGARRLKRRRRHRIQRVKKLLFDYNLLTDHSELSGINPYEARVKGLSQKLSEEEFSAALLHLAKRRGVHNVNEVEEDTGNELSTKEQISRNSKALEEKYVAELQLERLKKDGEVRGSINRFKTSDYVKEAKQLLKVQKAYHQLDQSFIDTYIDLLETRRTYYEGPGEGSPFGWKDIKEWYEMLMGHCTYFPEELRSVKYAYNADLYNALNDLNNLVITRDENEKLEYYEKFQIIENVFKQKKKPTLKQIAKEILVNEEDIKGYRVTSTGKPEFTNLKVYHDIKDITARKEIIENAELLDQIAKILTIYQSSEDIQEELTNLNSELTQEEIEQISNLKGYTGTHNLSLKAINLILDELWHTNDNQIAIFNRLKLVPKKVDLSQQKEIPTTLVDDFILSPVVKRSFIQSIKVINAIIKKYGLPNDIIIELAREKNSKDAQKMINEMQKRNRQTNERIEEIIRTTGKENAKYLIEKIKLHDMQEGKCLYSLEAIPLEDLLNNPFNYEVDHIIPRSVSFDNSFNNKVLVKQEEASKKGNRTPFQYLSSSDSKISYETFKKHILNLAKGKGRISKTKKEYLLEERDINRFSVQKDFINRNLVDTRYATRGLMNLLRSYFRVNNLDVKVKSINGGFTSFLRRKWKFKKERNKGYKHHAEDALIIANADFIFKEWKKLDKAKKVMENQMFEEKQAESMPEIETEQEYKEIFITPHQIKHIKDFKDYKYSHRVDKKPNRELINDTLYSTRKDDKGNTLIVNNLNGLYDKDNDKLKKLINKSPEKLLMYHHDPQTYQKLKLIMEQYGDEKNPLYKYYEETGNYLTKYSKKDNGPVIKKIKYYGNKLNAHLDITDDYPNSRNKVVKLSLKPYRFDVYLDNGVYKFVTVKNLDVIKKENYYEVNSKCYEEAKKLKKISNQAEFIASFYNNDLIKINGELYRVIGVNNDLLNRIEVNMIDITYREYLENMNDKRPPRIIKTIASKTQSIKKYSTDILGNLYEVKSKKHPQIIKKG

SEQ ID NO: 1463 - protein, 1368 aa, Streptococcus pyogenes [sequence omitted]

SEQ ID NO: 1464 - protein, 1367 aa, Streptococcus pyogenes
  REGION 1..1367: note = dSpCas9 (AA)
DKKYSIGLAIGTNSVGWAVITDEYKVPSKKFKVLGNTDRHSIKKNLIGALLFDSGETAEATRLKRTARRRYTRRKNRICYLQEIFSNEMAKVDDSFFHRLEESFLVEEDKKHERHPIFGNIVDEVAYHEKYPTIYHLRKKLVDSTDKADLRLIYLALAHMIKFRGHFLIEGDLNPDNSDVDKLFIQLVQTYNQLFEENPINASGVDAKAILSARLSKSRRLENLIAQLPGEKKNGLFGNLIALSLGLTPNFKSNFDLAEDAKLQLSKDTYDDDLDNLLAQIGDQYADLFLAAKNLSDAILLSDILRVNTEITKAPLSASMIKRYDEHHQDLTLLKALVRQQLPEKYKEIFFDQSKNGYAGYIDGGASQEEFYKFIKPILEKMDGTEELLVKLNREDLLRKQRTFDNGSIPHQIHLGELHAILRRQEDFYPFLKDNREKIEKILTFRIPYYVGPLARGNSRFAWMTRKSEETITPWNFEEVVDKGASAQSFIERMTNFDKNLPNEKVLPKHSLLYEYFTVYNELTKVKYVTEGMRKPAFLSGEQKKAIVDLLFKTNRKVTVKQLKEDYFKKIECFDSVEISGVEDRFNASLGTYHDLLKIIKDKDFLDNEENEDILEDIVLTLTLFEDREMIEERLKTYAHLFDDKVMKQLKRRRYTGWGRLSRKLINGIRDKQSGKTILDFLKSDGFANRNFMQLIHDDSLTFKEDIQKAQVSGQGDSLHEHIANLAGSPAIKKGILQTVKVVDELVKVMGRHKPENIVIEMARENQTTQKGQKNSRERMKRIEEGIKELGSQILKEHPVENTQLQNEKLYLYYLQNGRDMYVDQELDINRLSDYDVDAIVPQSFLKDDSIDNKVLTRSDKNRGKSDNVPSEEVVKKMKNYWRQLLNAKLITQRKFDNLTKAERGGLSELDKAGFIKRQLVETRQITKHVAQILDSRMNTKYDENDKLIREVKVITLKSKLVSDFRKDFQFYKVREINNYHHAHDAYLNAVVGTALIKKYPKLESEFVYGDYKVYDVRKMIAKSEQEIGKATAKYFFYSNIMNFFKTEITLANGEIRKRPLIETNGETGEIVWDKGRDFATVRKVLSMPQVNIVKKTEVQTGGFSKESILPKRNSDKLIARKKDWDPKKYGGFDSPTVAYSVLVVAKVEKGKSKKLKSVKELLGITIMERSSFEKNPIDFLEAKGYKEVKKDLIIKLPKYSLFELENGRKRMLASAGELQKGNELALPSKYVNFLYLASHYEKLKGSPEDNEQKQLFVEQHKHYLDEIIEQISEFSKRVILADANLDKVLSAYNKHRDKPIREQAENIIHLFTLTNLGAPAAFKYFDTTIDRKRYTSTKEVLDATLIHQSITGLYETRIDLSQLGGD

SEQ ID NO: 1465 - protein, 65 aa, synthetic construct
  REGION 1..65: note = KRAB (AA)
RTLVTFKDVFVDFTREEWKLLDTAQQILYRNVMLENYKNLVSLGYQLTKPDVILRLEKGEEPWLV

SEQ ID NO: 1466 - protein, 16 aa, synthetic construct
  REGION 1..16: note = NLS (AA)
KRPAATKKAGQAKKKK

SEQ ID NO: 1467 - protein, 7 aa, synthetic construct
  REGION 1..7: note = NLS-2 (AA)
PKKKRKV

SEQ ID NO: 1468 - protein, 5 aa, synthetic construct
  REGION 1..5: note = GGGGS linker (AA)
GGGGS

SEQ ID NO: 1469 - protein, 5 aa, synthetic construct
  REGION 1..5: note = GGGGG linker (AA)
GGGGG

SEQ ID NO: 1470 - protein, 5 aa, synthetic construct
  REGION 1..5: note = GGAGG linker (AA)
GGAGG

SEQ ID NO: 1471 - protein, 7 aa, synthetic construct
  REGION 1..7: note = GGGGSSS linker (AA)
GGGGSSS

SEQ ID NO: 1472 - protein, 7 aa, synthetic construct
  REGION 1..7: note = GGGGAAA linker (AA)
GGGGAAA

SEQ ID NO: 1473 - protein, 7 aa, SV40 virus
  REGION 1..7: note = NLS - SV40 (AA)
PKKKRKV

SEQ ID NO: 1474 - protein, 9 aa, synthetic construct
  REGION 1..9: note = NLS - cMyc (AA)
PAAKRVKLD

SEQ ID NO: 1475 - protein, 11 aa, synthetic construct
  REGION 1..11: note = NLS - cMyc (AA)
RQRRNELKRSP

SEQ ID NO: 1476 - protein, 38 aa, synthetic construct
  REGION 1..38: note = NLS - hRNPA1 M9 (AA)
NQSSNFGPMKGGNFGGRSSGPYGGGGQYFAKPRNQGGY

SEQ ID NO: 1477 - protein, 42 aa, synthetic construct
  REGION 1..42: note = NLS - IBB domain importin-alpha (AA)
RMRIZFKNKGKDTAELRRRRVEVSVELRKAKKDEQILKRRNV

SEQ ID NO: 1478 - protein, 8 aa, synthetic construct
  REGION 1..8: note = NLS - myoma T protein (AA)
VSRKRPRP

SEQ ID NO: 1479 - protein, 8 aa, synthetic construct
  REGION 1..8: note = NLS - myoma T protein (AA)
PPKKARED

SEQ ID NO: 1480 - protein, 8 aa, Homo sapiens
  REGION 1..8: note = NLS - human p53 (AA)
PQPKKKPL

SEQ ID NO: 1481 - protein, 12 aa, Mus musculus
  REGION 1..12: note = NLS - mouse c-abl IV (AA)
SALIKKKKKMAP

SEQ ID NO: 1482 - protein, 5 aa, Influenza virus
  REGION 1..5: note = NLS - influenza NS1 (AA)
DRLRR

SEQ ID NO: 1483 - protein, 7 aa, Influenza virus
  REGION 1..7: note = NLS - influenza NS1 (AA)
PKQKKRK

SEQ ID NO: 1484 - protein, 10 aa, Hepatitis virus
  REGION 1..10: note = NLS - hepatitis delta antigen (AA)
RKLKKKIKKL

SEQ ID NO: 1485 - protein, 10 aa, Mus musculus
  REGION 1..10: note = NLS - mouse Mx1 (AA)
REKKKFLKRR

SEQ ID NO: 1486 - protein, 20 aa, Homo sapiens
  REGION 1..20: note = NLS - human poly(ADP-ribose) polymerase (AA)
KRKGDEVDGVDEVAKKKSKK

SEQ ID NO: 1487 - protein, 17 aa, Homo sapiens
  REGION 1..17: note = NLS - glucocorticoid (AA)
RKCLQAGMNLEARKTKK

SEQ ID NO: 1488 - protein, 548 aa, synthetic construct
  REGION 1..548: note = ERF domain (AA)
MKTPADTGFAFPDWAYKPESSPGSRQIQLWHFILELLRKEEYQGVIAWQGDYGEFVIKDPDEVARLWGVRKCKPQMNYDKLSRALRYYYNKRILHKTKGKRFTYKFNFNKLVLVNYPFIDVGLAGGAVPQSAPPVPSGGSHFRFPPSTPSEVLSPTEDPRSPPACSSSSSSLFSAVVARRLGRGSVSDCSDGTSELEEPLGEDPRARPPGPPDLGAFRGPPLARLPHDPGVFRVYPRPRGGPEPLSPFPVSPLAGPGSLLPPQLSPALPMTPTHLAYTPSPTLSPMYPSGGGGPSGSGGGSHFSFSPEDMKRYLQAHTQSVYNYHLSPRAFLHYPGLVVPQPQRPDKCPLPPMAPETPPVPSSASSSSSSSSSPFKFKLQPPPLGRRQRAAGEKAVAGADKSGGSAGGLAEGAGALAPPPPPPQIKVEPISEGESEEVEVTDISDEDEEDGEVFKTPRAPPAPPKPEPGEAPGASQCMPLKLRFKRRWSEDCRLEGGGGPAGGFEDEGEDKKVRGEGPGEAGGPLTPRRVSSDLQHATAQLSLEHRDS

SEQ ID NO: 1489 - protein, 228 aa, synthetic construct
  REGION 1..228: note = MXI1 domain (AA)
MERVKMINVQRLLEAAEFLERRERECEHGYASSFPSMPSPRLQHSKPPRRLSRAQKHSSGSSNTSTANRSTHNELEKNRRAHLRLCLERLKVLIPLGPDCTRHTTLGLLNKAKAHIKKLEEAERKSQHQLENLEREQRFLKWRLEQLQGPQEMERIRMDSIGSTISSDRSDSEREEIEVDVESTEFSHGEVDNISTTSISDIDDHSSLPSIGSDEGYSSASVKLSFTS

SEQ ID NO: 1490 - protein, 144 aa, synthetic construct
  REGION 1..144: note = SID4X domain (AA)
ASPKKKRKVEASGSGMNIQMLLEAADYLERREREAEHGYASMLPGSGMNIQMLLEAADYLERREREAEHGYASMLPGSGMNIQMLLEAADYLERREREAEHGYASMLPGSGMNIQMLLEAADYLERREREAEHGYASMLPSRSR

SEQ ID NO: 1491 - protein, 220 aa, synthetic construct
  REGION 1..220: note = MAD-SID domain (AA)
MAAAVRMNIQMLLEAADYLERREREAEHGYASMLPYNNKDRDALKRRNKSKKNNSSSRSTHNEMEKNRRAHLRLCLEKLKGLVPLGPESSRHTTLSLLTKAKLHIKKLEDCDRKAVHQIDQLQREQRHLKRQLEKLGIERIRMDSIGSTVSSERSDSDREEIDVDVESTDYLTGDLDWSSSSVSDSDERGSMQSLGSDEGYSSTSIKRIKLQDSHKACLG

SEQ ID NO: 1492 - protein, 910 aa, synthetic construct
  REGION 1..910: note = DNMT3A (AA)
MPAMPSSGPGDTSSSAAEREEDRKDGEEQEEPRGKEERQEPSTTARKVGRPGRKRKHPPVESGDTPKDPAVISKSPSMAQDSGASELLPNGDLEKRSEPQPEEGSPAGGQKGGAPAEGEGAAETLPEASRAVENGCCTPKEGRGAPAEAGKEQKETNIESMKMEGSRGRLRGGLGWESSLRQRPMPRLTFQAGDPYYISKRKRDEWLARWKREAEKKAKVIAGMNAVEENQGPGESQKVEEASPPAVQQPTDPASPTVATTPEPVGSDAGDKNATKAGDDEPEYEDGRGFGIGELVWGKLRGFSWWPGRIVSWWMTGRSRAAEGTRWVMWFGDGKFSVVCVEKLMPLSSFCSAFHQATYNKQPMYRKAIYEVLQVASSRAGKLFPVCHDSDESDTAKAVEVQNKPMIEWALGGFQPSGPKGLEPPEEEKNPYKEVYTDMWVEPEAAAYAPPPPAKKPRKSTAEKPKVKEIIDERTRERLVYEVRQKCRNIEDICISCGSLNVTLEHPLFVGGMCQNCKNCFLECAYQYDDDGYQSYCTICCGGREVLMCGNNNCCRCFCVECVDLLVGPGAAQAAIKEDPWNCYMCGHKGTYGLLRRREDWPSRLQMFFANNHDQEFDPPKVYPPVPAEKRKPIRVLSLFDGIATGLLVLKDLGIQVDRYIASEVCEDSITVGMVRHQGKIMYVGDVRSVTQKHIQEWGPFDLVIGGSPCNDLSIVNPARKGLYEGTGRLFFEFYRLLHDARPKEGDDRPFFWLFENVVAMGVSDKRDISRFLESNPVMIDAKEVSAAHRARYFWGNLPGMNRPLASTVNDKLELQECLEHGRIAKFSKVRTITTRSNSIKQGKDQHFPVFMNEKEDILWCTEMERVFGFPVHYTDVSNMSRLARQRLLGRSWSVPVIRHLFAPLKEYFA

SEQ ID NO: 1493 - protein, 853 aa, synthetic construct
  REGION 1..853: note = DNMT3B (AA)
MKGDTRHLNGEEDAGGREDSILVNGACSDQSSDSPPILEAIRTPEIRGRRSSSRLSKREVSSLLSYTQDLTGDGDGEDGDGSDTPVMPKLFRETRTRSESPAVRTRNNNSVSSRERHRPSPRSTRGRQGRNHVDESPVEFPATRSLRRRATASAGTPWPSPPSSYLTIDLTDDTEDTHGTPQSSSTPYARLAQDSQQGGMESPQVEADSGDGDSSEYQDGKEFGIGDLVWGKIKGFSWWPAMVVSWKATSKRQAMSGMRWVQWFGDGKFSEVSADKLVALGLFSQHFNLATFNKLVSYRKAMYHALEKARVRAGKTFPSSPGDSLEDQLKPMLEWAHGGFKPTGIEGLKPNNTQPVVNKSKVRRAGSRKLESRKYENKTRRRTADDSATSDYCPAPKRLKTNCYNNGKDRGDEDQSREQMASDVANNKSSLEDGCLSCGRKNPVSFHPLFEGGLCQTCRDRFLELFYMYDDDGYQSYCTVCCEGRELLLCSNTSCCRCFCVECLEVLVGTGTAAEAKLQEPWSCYMCLPQRCHGVLRRRKDWNVRLQAFFTSDTGLEYEAPKLYPAIPAARRRPIRVLSLFDGIATGYLVLKELGIKVGKYVASEVCEESIAVGTVKHEGNIKYVNDVRNITKKNIEEWGPFDLVIGGSPCNDLSNVNPARKGLYEGTGRLFFEFYHLLNYSRPKEGDDRPFFWMFENVVAMKVGDKRDISRFLECNPVMIDAIKVSAAHRARYFWGNLPGMNRPVIASKNDKLELQDCLEYNRIAKLKKVQTITTKSNSIKQGKNQLFPVVMNGKEDVLWCTELERIFGFPVHYTDVSNMGRGARQKLLGRSWSVPVIRHLFAPLKDYFACE

SEQ ID NO: 1494 - protein, 852 aa, synthetic construct
  REGION 1..852: note = LSD1 (AA)
MLSGKKAAAAAAAAAAAATGTEAGPGTAGGSENGSEVAAQPAGLSGPAEVGPGAVGERTPRKKEPPRASPPGGLAEPPGSAGPQAGPTVVPGSATPMETGIAETPEGRRTSRRKRAKVEYREMDESLANLSEDEYYSEEERNAKAEKEKKLPPPPPQAPPEEENESEPEEPSGVEGAAFQSRLPHDRMTSQEAACFPDIISGPQQTQKVFLFIRNRTLQLWLDNPKIQLTFEATLQQLEAPYNSDTVLVHRVHSYLERHGLINFGIYKRIKPLPTKKTGKVIIIGSGVSGLAAARQLQSFGMDVTLLEARDRVGGRVATFRKGNYVADLGAMVVTGLGGNPMAVVSKQVNMELAKIKQKCPLYEANGQAVPKEKDEMVEQEFNRLLEATSYLSHQLDFNVLNNKPVSLGQALEVVIQLQEKHVKDEQIEHWKKIVKTQEELKELLNKMVNLKEKIKELHQQYKEASEVKPPRDITAEFLVKSKHRDLTALCKEYDELAETQGKLEEKLQELEANPPSDVYLSSRDRQILDWHFANLEFANATPLSTLSLKHWDQDDDFEFTGSHLTVRNGYSCVPVALAEGLDIKLNTAVRQVRYTASGCEVIAVNTRSTSQTFIYKCDAVLCTLPLGVLKQQPPAVQFVPPLPEWKTSAVQRMGFGNLNKVVLCFDRVFWDPSVNLFGHVGSTTASRGELFLFWNLYKAPILLALVAGEAAGIMENISDDVIVGRCLAILKGIFGSSAVPQPKETVVSRWRADPWARGSYSYVAAGSSGNDYDLMAQPITPGPSIPGAPQPIPRLFFAGEHTIRNYPATVHGALLSGLREAGRIADQFLGAMYTLPRQATPGVPAQQSPSM

SEQ ID NO: 1495 - protein, 384 aa, synthetic construct
  REGION 1..384: note = DNMT3L
MAAIPALDPEAEPSMDVILVGSSELSSSVSPGTGRDLIAYEVKANQRNIEDICICCGSLQVHTQHPLFEGGICAPCKDKFLDALFLYDDDGYQSYCSICSGETLLICGNPDCTRCYCFECVDSLVGPGTSGKVHAMSNWVCYLCLPSSSGLLQRRRKWRSQLKAFYDRESENPLEMFETVPVWRRQPVRVLSLFEDIKKELTSLGFLESGSDPGQLKHVVDVTDTVRKDVEEWGPFDLVYGATPPLGHTCDRPPSWYLFQFHRLLQYARPKPGSPRPFFWMFVDNLVLNKEDLDVASRFLEMEPVTIPDVHGGSLQNAVRVWSNIPAIRSRHWALVSEEELSLLAQNKQSSKLAAKWPTKLVKNCFLPLREYFKYFSTELTSSL

SEQ ID NO: 1496-1504 - skipped (9 entries)

SEQ ID NO: 1505 - DNA, 6201 bp, synthetic construct
  source 1..6201: mol_type = other DNA
  misc_feature 1..6201: note = DNMT3A/L-dCas9-KRAB (nt)
aaccacgatcaggagtttgacccccctaaggtgtacccacccgtgccagccgagaagaggaagcccatccgcgtgctgtccctgttcgacggcatcgccacaggcctgctggtgctgaaggatctgggcatccaggtggacagatatatcgcctccgaggtgtgcgaggattctatcaccgtgggcatggtgaggcaccagggcaagatcatgtacgtgggcgacgtgcgcagcgtgacacagaagcacatccaggagtggggacccttcgacctggtcatcggaggcagcccctgtaatgacctgtccatcgtgaaccctgcaaggaagggcctgtatgagggaaccggcagactgttctttgagttctacaggctgctgcacgacgcccgccctaaggagggcgatgacaggccattcttttggctgtttgagaacgtggtggccatgggcgtgagcgacaagcgggatatctccagattcctggagtctaatcccgtgatgatcgatgcaaaggaggtgtctgccgcacacagggcaaggtacttttggggaaatctgcctggcatgaaccgcccactggccagcaccgtgaacgacaagctggagctgcaggagtgcctggagcacggaaggatcgccaagttctccaaggtgcggacaatcaccacaagatctaacagcatcaagcagggcaaggatcagcacttccccgtgttcatgaatgagaaggaggacatcctgtggtgtaccgagatggagcgcgtgttcggctttccagtgcactatacagacgtgagcaatatgagccggctggcaaggcagagactgctgggccggtcctggtctgtgccagtgatcagacacctgttcgcccccctgaaggagtactttgcctgcgtgtctagcggcaactctaatgccaacagcagaggcccttccttttcctctggcctggtgccactgtctctgaggggcagccacatgggccccatggagatctacaagaccgtgtccgcctggaagaggcagcctgtgcgcgtgctgtctctgttccgcaacatcgacaaggtgctgaagagcctgggctttctggagagcggatccggatctggaggaggcaccctgaagtatgtggaggatgtgacaaatgtggtgcggagagatgtggagaagtggggccccttcgatctggtgtacggatccacccagccactgggaagctcctgcgataggtgtccaggatggtatatgttccagtttcacagaatcctgcagtacgcactgccaaggcaggagagccagcgccctttcttttggatctttatggacaacctgctgctgacagaggatgaccaggagacaacaacccgcttcctgcagacagaggcagtgaccctgcaggatgtgaggggacgcgactatcagaatgccatgcgggtgtggtctaacatccctggcctgaagagcaagcacgcccccctgacccctaaggaggaggagtacctgcaggcccaggtgcggagcagatccaagctggatgcccctaaggtggacctgctggtgaagaattgtctgctgccactgcgggagtacttcaagtactttagtcagaatagcctgccactggaggcaagcggatccggaagggcatctcctggaatcccaggaagcacccgcaaccccaagaagaagcggaaggtgggcatccacggcgtgcccgccgccgacaagaagtacagcatcggcctggccatcggcaccaacagcgtgggctgggccgtgatcaccgacgagtacaaggtgcccagcaagaagttcaaggtgctgggcaacaccgaccggcacagcatcaagaagaacctgatcggcgccctgctgttcgacagcggcgagaccgccgaggccacccggctgaagcggaccgcccggcggcggtacacccggcggaagaaccggatctgctacctgcaggagatcttcagcaacgagatggccaaggtggacgacagcttcttccaccggctggaggagagcttcctggtggaggaggacaagaagcacgagcggcaccccatcttcggcaacatcgtggacgaggtggcctaccacgagaagtaccccaccatctaccacctgcggaagaagctggtggacagcaccgacaaggccgacctgcggctgatctacctggccctggcccacatgatcaagttccggggccacttcctgatcgagggcgacctgaaccccgacaacagcgacgtggacaagctgttcatccagctggtgcagacctacaaccagctgttcgaggagaaccccatcaacgccagcggcgtggacgccaaggccatcctgagcgcccggctgagcaagagccggcggctggagaacctgatcgcccagctgcccggcgagaagaagaacggcctgttcggcaacctgatcgccctgagcctgggcctgacccccaacttcaagagcaacttcgacctggccgaggacgccaagctgcagctgagcaaggacacctacgacgacgacctggacaacctgctggcccagatcggcgaccagtacgccgacctgttcctggccgccaagaacctgagcgacgccatcctgctgagcgacatcctgcgggtgaacaccgagatcaccaaggcccccctgagcgccagcatgatcaagcggtacgacgagcaccaccaggacctgaccctgctgaaggccctggtgcggcagcagctgcccgagaagtacaaggagatcttcttcgaccagagcaagaacggctacgccggctacatcgacggcggcgccagccaggaggagttctacaagttcatcaagcccatcctggagaagatggacggcaccgaggagctgctggtgaagctgaaccgggaggacctgctgcggaagcagcggaccttcgacaacggcagcatcccccaccagatccacctgggcgagctgcacgccatcctgcggcggcaggaggacttctaccccttcctgaaggacaaccgggagaagatcgagaagatcctgaccttccggatcccctactacgtgggccccctggcccggggcaacagccggttcgcctggatgacccggaagagcgaggagaccatcaccccctggaacttcgaggaggtggtggacaagggcgccagcgcccagagcttcatcgagcggatgaccaacttcgacaagaacctgcccaacgagaaggtgctgcccaagcacagcctgctgtacgagtacttcaccgtgtacaacgagctgaccaaggtgaagtacgtgaccgagggcatgcggaagcccgccttcctgagcggcgagcagaagaaggccatcgtggacctgctgttcaagaccaaccggaaggtgaccgtgaagcagctgaaggaggactacttcaagaagatcgagtgcttcgacagcgtggagatcagcggcgtggaggaccggttcaacgccagcctgggcacctaccacgacctgctgaagatcatcaaggacaaggacttcctggacaacgaggagaacgaggacatcctggaggacatcgtgctgaccctgaccctgttcgaggaccgggagatgatcgaggagcggctgaagacctacgcccacctgttcgacgacaaggtgatgaagcagctgaagcggcggcggtacaccggctggggccggctgagccggaagctgatcaacggcatccgggacaagcagagcggcaagaccatcctggacttcctgaagagcgacggcttcgccaaccggaacttcatgcagctgatccacgacgacagcctgaccttcaaggaggacatccagaaggcccaggtgagcggccagggcgacagcctgcacgagcacatcgccaacctggccggcagccccgccatcaagaagggcatcctgcagaccgtgaaggtggtggacgagctggtgaaggtgatgggccggcacaagcccgagaacatcgtgatcgagatggcccgggagaaccagaccacccagaagggccagaagaacagccgggagcggatgaagcggatcgaggagggcatcaaggagctgggcagccagatcctgaaggagcaccccgtggagaacacccagctgcagaacgagaagctgtacctgtactacctgcagaacggccgggacatgtacgtggaccaggagctggacatcaaccggctgagcgactacgacgtggacgccatcgtgccccagagcttcctgaaggacgacagcatcgacaacaaggtgctgacccggagcgacaagaaccggggcaagagcgacaacgtgcccagcgaggaggtggtgaagaagatgaagaactactggcggcagctgctgaacgccaagctgatcacccagcggaagttcgacaacctgaccaaggccgagcggggcggcctgagcgagctggacaaggccggcttcatcaagcggcagctggtggagacccggcagatcaccaagcacgtggcccagatcctggacagccggatgaacaccaagtacgacgagaacgacaagctgatccgggaggtgaaggtgatcaccctgaagagcaagctggtgagcgacttccggaaggacttccagttctacaaggtgcgggagatcaacaactaccaccacgcccacgacgcctacctgaacgccgtggtgggcaccgccctgatcaagaagtaccccaagctggagagcgagttcgtgtacggcgactacaaggtgtacgacgtgcggaagatgatcgccaagagcgagcaggagatcggcaaggccaccgccaagtacttcttctacagcaacatcatgaacttcttcaagaccgagatcaccctggccaacggcgagatccggaagcggcccctgatcgagaccaacggcgagaccggcgagatcgtgtgggacaagggccgggacttcgccaccgtgcggaaggtgctgagcatgccccaggtgaacatcgtgaagaagaccgaggtgcagaccggcggcttcagcaaggagagcatcctgcccaagcggaacagcgacaagctgatcgcccggaagaaggactgggaccccaagaagtacggcggcttcgacagccccaccgtggcctacagcgtgctggtggtggccaaggtggagaagggcaagagcaagaagctgaagagcgtgaaggagctgctgggcatcaccatcatggagcggagcagcttcgagaagaaccccatcgacttcctggaggccaagggctacaaggaggtgaagaaggacctgatcatcaagctgcccaagtacagcctgttcgagctggagaacggccggaagcggatgctggccagcgccggcgagctgcagaagggcaacgagctggccctgcccagcaagtacgtgaacttcctgtacctggccagccactacgagaagctgaagggcagccccgaggacaacgagcagaagcagctgttcgtggagcagcacaagcactacctggacgagatcatcgagcagatcagcgagttcagcaagcgggtgatcctggccgacgccaacctggacaaggtgctgagcgcctacaacaagcaccgggacaagcccatccgggagcaggccgagaacatcatccacctgttcaccctgaccaacctgggcgcccccgccgccttcaagtacttcgacaccaccatcgaccggaagcggtacaccagcaccaaggaggtgctggacgccaccctgatccaccagagcatcaccggcctgtacgagacccggatcgacctgagccagctgggcggcgacagcggcggcaagcggcccgccgccaccaagaaggccggccaggccaagaagaagaaggctagcgatgctaagtcactgactgcctggtcccggacactggtgaccttcaaggatgtgtttgtggacttcaccagggaggagtggaagctgctggacactgctcagcagatcctgtacagaaatgtgatgctggagaactataagaacctggtttccttgggttatcagcttactaagccagatgtgatcctccggttggagaagggagaagagccctggctggtggagagagaaattcaccaagagacccatcctgattcagagactgcatttgaaatcaaatcatcagttccgaaaaagaaacgcaaagtt

SEQ ID NO: 1506 - protein, 2067 aa, synthetic construct
  REGION 1..2067: note = DNMT3A/L-dCas9-KRAB(AA)
NHDQEFDPPKVYPPVPAEKRKPIRVLSLFDGIATGLLVLKDLGIQVDRYIASEVCEDSITVGMVRHQGKIMYVGDVRSVTQKHIQEWGPFDLVIGGSPCNDLSIVNPARKGLYEGTGRLFFEFYRLLHDARPKEGDDRPFFWLFENVVAMGVSDKRDISRFLESNPVMIDAKEVSAAHRARYFWGNLPGMNRPLASTVNDKLELQECLEHGRIAKFSKVRTITTRSNSIKQGKDQHFPVFMNEKEDILWCTEMERVFGFPVHYTDVSNMSRLARQRLLGRSWSVPVIRHLFAPLKEYFACVSSGNSNANSRGPSFSSGLVPLSLRGSHMGPMEIYKTVSAWKRQPVRVLSLFRNIDKVLKSLGFLESGSGSGGGTLKYVEDVTNVVRRDVEKWGPFDLVYGSTQPLGSSCDRCPGWYMFQFHRILQYALPRQESQRPFFWIFMDNLLLTEDDQETTTRFLQTEAVTLQDVRGRDYQNAMRVWSNIPGLKSKHAPLTPKEEEYLQAQVRSRSKLDAPKVDLLVKNCLLPLREYFKYFSQNSLPLEASGSGRASPGIPGSTRNPKKKRKVGIHGVPAADKKYSIGLAIGTNSVGWAVITDEYKVPSKKFKVLGNTDRHSIKKNLIGALLFDSGETAEATRLKRTARRRYTRRKNRICYLQEIFSNEMAKVDDSFFHRLEESFLVEEDKKHERHPIFGNIVDEVAYHEKYPTIYHLRKKLVDSTDKADLRLIYLALAHMIKFRGHFLIEGDLNPDNSDVDKLFIQLVQTYNQLFEENPINASGVDAKAILSARLSKSRRLENLIAQLPGEKKNGLFGNLIALSLGLTPNFKSNFDLAEDAKLQLSKDTYDDDLDNLLAQIGDQYADLFLAAKNLSDAILLSDILRVNTEITKAPLSASMIKRYDEHHQDLTLLKALVRQQLPEKYKEIFFDQSKNGYAGYIDGGASQEEFYKFIKPILEKMDGTEELLVKLNREDLLRKQRTFDNGSIPHQIHLGELHAILRRQEDFYPFLKDNREKIEKILTFRIPYYVGPLARGNSRFAWMTRKSEETITPWNFEEVVDKGASAQSFIERMTNFDKNLPNEKVLPKHSLLYEYFTVYNELTKVKYVTEGMRKPAFLSGEQKKAIVDLLFKTNRKVTVKQLKEDYFKKIECFDSVEISGVEDRFNASLGTYHDLLKIIKDKDFLDNEENEDILEDIVLTLTLFEDREMIEERLKTYAHLFDDKVMKQLKRRRYTGWGRLSRKLINGIRDKQSGKTILDFLKSDGFANRNFMQLIHDDSLTFKEDIQKAQVSGQGDSLHEHIANLAGSPAIKKGILQTVKVVDELVKVMGRHKPENIVIEMARENQTTQKGQKNSRERMKRIEEGIKELGSQILKEHPVENTQLQNEKLYLYYLQNGRDMYVDQELDINRLSDYDVDAIVPQSFLKDDSIDNKVLTRSDKNRGKSDNVPSEEVVKKMKNYWRQLLNAKLITQRKFDNLTKAERGGLSELDKAGFIKRQLVETRQITKHVAQILDSRMNTKYDENDKLIREVKVITLKSKLVSDFRKDFQFYKVREINNYHHAHDAYLNAVVGTALIKKYPKLESEFVYGDYKVYDVRKMIAKSEQEIGKATAKYFFYSNIMNFFKTEITLANGEIRKRPLIETNGETGEIVWDKGRDFATVRKVLSMPQVNIVKKTEVQTGGFSKESILPKRNSDKLIARKKDWDPKKYGGFDSPTVAYSVLVVAKVEKGKSKKLKSVKELLGITIMERSSFEKNPIDFLEAKGYKEVKKDLIIKLPKYSLFELENGRKRMLASAGELQKGNELALPSKYVNFLYLASHYEKLKGSPEDNEQKQLFVEQHKHYLDEIIEQISEFSKRVILADANLDKVLSAYNKHRDKPIREQAENIIHLFTLTNLGAPAAFKYFDTTIDRKRYTSTKEVLDATLIHQSITGLYETRIDLSQLGGDSGGKRPAATKKAGQAKKKKASDAKSLTAWSRTLVTFKDVFVDFTREEWKLLDTAQQILYRNVMLENYKNLVSLGYQLTKPDVILRLEKGEEPWLVEREIHQETHPDSETAFEIKSSVPKKKRKV

SEQ ID NO: 1507 - DNA, 6399 bp, synthetic construct
  source 1..6399: mol_type = other DNA
  misc_feature 1..6399: note = DNMT3A/L-XTEN80-dSpCas9-KRAB (nt)
atgaaccacgatcaggagtttgacccccctaaggtgtacccacccgtgccagccgagaagaggaagcccatccgcgtgctgtccctgttcgacggcatcgccacaggcctgctggtgctgaaggatctgggcatccaggtggacagatatatcgcctccgaggtgtgcgaggattctatcaccgtgggcatggtgaggcaccagggcaagatcatgtacgtgggcgacgtgcgcagcgtgacacagaagcacatccaggagtggggacccttcgacctggtcatcggaggcagcccctgtaatgacctgtccatcgtgaaccctgcaaggaagggcctgtatgagggaaccggcagactgttctttgagttctacaggctgctgcacgacgcccgccctaaggagggcgatgacaggccattcttttggctgtttgagaacgtggtggccatgggcgtgagcgacaagcgggatatctccagattcctggagtctaatcccgtgatgatcgatgcaaaggaggtgtctgccgcacacagggcaaggtacttttggggaaatctgcctggcatgaaccgcccactggccagcaccgtgaacgacaagctggagctgcaggagtgcctggagcacggaaggatcgccaagttctccaaggtgcggacaatcaccacaagatctaacagcatcaagcagggcaaggatcagcacttccccgtgttcatgaatgagaaggaggacatcctgtggtgtaccgagatggagcgcgtgttcggctttccagtgcactatacagacgtgagcaatatgagccggctggcaaggcagagactgctgggccggtcctggtctgtgccagtgatcagacacctgttcgcccccctgaaggagtactttgcctgcgtgtctagcggcaactctaatgccaacagcagaggcccttccttttcctctggcctggtgccactgtctctgaggggcagccacatgggccccatggagatctacaagaccgtgtccgcctggaagaggcagcctgtgcgcgtgctgtctctgttccgcaacatcgacaaggtgctgaagagcctgggctttctggagagcggatccggatctggaggaggcaccctgaagtatgtggaggatgtgacaaatgtggtgcggagagatgtggagaagtggggccccttcgatctggtgtacggatccacccagccactgggaagctcctgcgataggtgtccaggatggtatatgttccagtttcacagaatcctgcagtacgcactgccaaggcaggagagccagcgccctttcttttggatctttatggacaacctgctgctgacagaggatgaccaggagacaacaacccgcttcctgcagacagaggcagtgaccctgcaggatgtgaggggacgcgactatcagaatgccatgcgggtgtggtctaacatccctggcctgaagagcaagcacgcccccctgacccctaaggaggaggagtacctgcaggcccaggtgcggagcagatccaagctggatgcccctaaggtggacctgctggtgaagaattgtctgctgccactgcgggagtacttcaagtactttagtcagaatagcctgccactgggagggccgagctctggcgcacccccaccaagtggagggtctcctgccgggtccccaacatctactgaagaaggcaccagcgaatccgcaacgcccgagtcaggccctggtacctccacagaaccatctgaaggtagtgcgcctggttccccagctggaagccctacttccaccgaagaaggcacgtcaaccgaaccaagtgaaggatctgcccctgggaccagcactgaaccatctgaggttaaccccaagaagaagcggaaggtgggcatccacggcgtgcccgccgccgacaagaagtacagcatcggcctggccatcggcaccaacagcgtgggctgggccgtgatcaccgacgagtacaaggtgcccagcaagaagttcaaggtgctgggcaacaccgaccggcacagcatcaagaagaacctgatcggcgccctgctgttcgacagcggcgagaccgccgaggccacccggctgaagcggaccgcccggcggcggtacacccggcggaagaaccggatctgctacctgcaggagatcttcagcaacgagatggccaaggtggacgacagcttcttccaccggctggaggagagcttcctggtggaggaggacaagaagcacgagcggcaccccatcttcggcaacatcgtggacgaggtggcctaccacgagaagtaccccaccatctaccacctgcggaagaagctggtggacagcaccgacaaggccgacctgcggctgatctacctggccctggcccacatgatcaagttccggggccacttcctgatcgagggcgacctgaaccccgacaacagcgacgtggacaagctgttcatccagctggtgcagacctacaaccagctgttcgaggagaaccccatcaacgccagcggcgtggacgccaaggccatcctgagcgcccggctgagcaagagccggcggctggagaacctgatcgcccagctgcccggcgagaagaagaacggcctgttcggcaacctgatcgccctgagcctgggcctgacccccaacttcaagagcaacttcgacctggccgaggacgccaagctgcagctgagcaaggacacctacgacgacgacctggacaacctgctggcccagatcggcgaccagtacgccgacctgttcctggccgccaagaacctgagcgacgccatcctgctgagcgacatcctgcgggtgaacaccgagatcaccaaggcccccctgagcgccagcatgatcaagcggtacgacgagcaccaccaggacctgaccctgctgaaggccctggtgcggcagcagctgcccgagaagtacaaggagatcttcttcgaccagagcaagaacggctacgccggctacatcgacggcggcgccagccaggaggagttctacaagttcatcaagcccatcctggagaagatggacggcaccgaggagctgctggtgaagctgaaccgggaggacctgctgcggaagcagcggaccttcgacaacggcagcatcccccaccagatccacctgggcgagctgcacgccatcctgcggcggcaggaggacttctaccccttcctgaaggacaaccgggagaagatcgagaagatcctgaccttccggatcccctactacgtgggccccctggcccggggcaacagccggttcgcctggatgacccggaagagcgaggagaccatcaccccctggaacttcgaggaggtggtggacaagggcgccagcgcccagagcttcatcgagcggatgaccaacttcgacaagaacctgcccaacgagaaggtgctgcccaagcacagcctgctgtacgagtacttcaccgtgtacaacgagctgaccaaggtgaagtacgtgaccgagggcatgcggaagcccgccttcctgagcggcgagcagaagaaggccatcgtggacctgctgttcaagaccaaccggaaggtgaccgtgaagcagctgaaggaggactacttcaagaagatcgagtgcttcgacagcgtggagatcagcggcgtggaggaccggttcaacgccagcctgggcacctaccacgacctgctgaagatcatcaaggacaaggacttcctggacaacgaggagaacgaggacatcctggaggacatcgtgctgaccctgaccctgttcgaggaccgggagatgatcgaggagcggctgaagacctacgcccacctgttcgacgacaaggtgatgaagcagctgaagcggcggcggtacaccggctggggccggctgagccggaagctgatcaacggcatccgggacaagcagagcggcaagaccatcctggacttcctgaagagcgacggcttcgccaaccggaacttcatgcagctgatccacgacgacagcctgaccttcaaggaggacatccagaaggcccaggtgagcggccagggcgacagcctgcacgagcacatcgccaacctggccggcagccccgccatcaagaagggcatcctgcagaccgtgaaggtggtggacgagctggtgaaggtgatgggccggcacaagcccgagaacatcgtgatcgagatggcccgggagaaccagaccacccagaagggccagaagaacagccgggagcggatgaagcggatcgaggagggcatcaaggagctgggcagccagatcctgaaggagcaccccgtggagaacacccagctgcagaacgagaagctgtacctgtactacctgcagaacggccgggacatgtacgtggaccaggagctggacatcaaccggctgagcgactacgacgtggacgccatcgtgccccagagcttcctgaaggacgacagcatcgacaacaaggtgctgacccggagcgacaagaaccggggcaagagcgacaacgtgcccagcgaggaggtggtgaagaagatgaagaactactggcggcagctgctgaacgccaagctgatcacccagcggaagttcgacaacctgaccaaggccgagcggggcggcctgagcgagctggacaaggccggcttcatcaagcggcagctggtggagacccggcagatcaccaagcacgtggcccagatcctggacagccggatgaacaccaagtacgacgagaacgacaagctgatccgggaggtgaaggtgatcaccctgaagagcaagctggtgagcgacttccggaaggacttccagttctacaaggtgcgggagatcaacaactaccaccacgcccacgacgcctacctgaacgccgtggtgggcaccgccctgatcaagaagtaccccaagctggagagcgagttcgtgtacggcgactacaaggtgtacgacgtgcggaagatgatcgccaagagcgagcaggagatcggcaaggccaccgccaagtacttcttctacagcaacatcatgaacttcttcaagaccgagatcaccctggccaacggcgagatccggaagcggcccctgatcgagaccaacggcgagaccggcgagatcgtgtgggacaagggccgggacttcgccaccgtgcggaaggtgctgagcatgccccaggtgaacatcgtgaagaagaccgaggtgcagaccggcggcttcagcaaggagagcatcctgcccaagcggaacagcgacaagctgatcgcccggaagaaggactgggaccccaagaagtacggcggcttcgacagccccaccgtggcctacagcgtgctggtggtggccaaggtggagaagggcaagagcaagaagctgaagagcgtgaaggagctgctgggcatcaccatcatggagcggagcagcttcgagaagaaccccatcgacttcctggaggccaagggctacaaggaggtgaagaaggacctgatcatcaagctgcccaagtacagcctgttcgagctggagaacggccggaagcggatgctggccagcgccggcgagctgcagaagggcaacgagctggccctgcccagcaagtacgtgaacttcctgtacctggccagccactacgagaagctgaagggcagccccgaggacaacgagcagaagcagctgttcgtggagcagcacaagcactacctggacgagatcatcgagcagatcagcgagttcagcaagcgggtgatcctggccgacgccaacctggacaaggtgctgagcgcctacaacaagcaccgggacaagcccatccgggagcaggccgagaacatcatccacctgttcaccctgaccaacctgggcgcccccgccgccttcaagtacttcgacaccaccatcgaccggaagcggtacaccagcaccaaggaggtgctggacgccaccctgatccaccagagcatcaccggcctgtacgagacccggatcgacctgagccagctgggcggcgacagcggcggcaagcggcccgccgccaccaagaaggccggccaggccaagaagaagaaggctagcgatgctaagtcactgactgcctggtcccggacactggtgaccttcaaggatgtgtttgtggacttcaccagggaggagtggaagctgctggacactgctcagcagatcctgtacagaaatgtgatgctggagaactataagaacctggtttccttgggttatcagcttactaagccagatgtgatcctccggttggagaagggagaagagccctggctggtggagagagaaattcaccaagagacccatcctgattcagagactgcatttgaaatcaaatcatcagttccgaaaaagaaacgcaaagtttag

SEQ ID NO: 1508 - protein, 2132 aa, synthetic construct
  REGION 1..2132: note = DNMT3A/L-XTEN80-dSpCas9-KRAB (AA)
MNHDQEFDPPKVYPPVPAEKRKPIRVLSLFDGIATGLLVLKDLGIQVDRYIASEVCEDSITVGMVRHQGKIMYVGDVRSVTQKHIQEWGPFDLVIGGSPCNDLSIVNPARKGLYEGTGRLFFEFYRLLHDARPKEGDDRPFFWLFENVVAMGVSDKRDISRFLESNPVMIDAKEVSAAHRARYFWGNLPGMNRPLASTVNDKLELQECLEHGRIAKFSKVRTITTRSNSIKQGKDQHFPVFMNEKEDILWCTEMERVFGFPVHYTDVSNMSRLARQRLLGRSWSVPVIRHLFAPLKEYFACVSSGNSNANSRGPSFSSGLVPLSLRGSHMGPMEIYKTVSAWKRQPVRVLSLFRNIDKVLKSLGFLESGSGSGGGTLKYVEDVTNVVRRDVEKWGPFDLVYGSTQPLGSSCDRCPGWYMFQFHRILQYALPRQESQRPFFWIFMDNLLLTEDDQETTTRFLQTEAVTLQDVRGRDYQNAMRVWSNIPGLKSKHAPLTPKEEEYLQAQVRSRSKLDAPKVDLLVKNCLLPLREYFKYFSQNSLPLGGPSSGAPPPSGGSPAGSPTSTEEGTSESATPESGPGTSTEPSEGSAPGSPAGSPTSTEEGTSTEPSEGSAPGTSTEPSEVNPKKKRKVGIHGVPAADKKYSIGLAIGTNSVGWAVITDEYKVPSKKFKVLGNTDRHSIKKNLIGALLFDSGETAEATRLKRTARRRYTRRKNRICYLQEIFSNEMAKVDDSFFHRLEESFLVEEDKKHERHPIFGNIVDEVAYHEKYPTIYHLRKKLVDSTDKADLRLIYLALAHMIKFRGHFLIEGDLNPDNSDVDKLFIQLVQTYNQLFEENPINASGVDAKAILSARLSKSRRLENLIAQLPGEKKNGLFGNLIALSLGLTPNFKSNFDLAEDAKLQLSKDTYDDDLDNLLAQIGDQYADLFLAAKNLSDAILLSDILRVNTEITKAPLSASMIKRYDEHHQDLTLLKALVRQQLPEKYKEIFFDQSKNGYAGYIDGGASQEEFYKFIKPILEKMDGTEELLVKLNREDLLRKQRTFDNGSIPHQIHLGELHAILRRQEDFYPFLKDNREKIEKILTFRIPYYVGPLARGNSRFAWMTRKSEETITPWNFEEVVDKGASAQSFIERMTNFDKNLPNEKVLPKHSLLYEYFTVYNELTKVKYVTEGMRKPAFLSGEQKKAIVDLLFKTNRKVTVKQLKEDYFKKIECFDSVEISGVEDRFNASLGTYHDLLKIIKDKDFLDNEENEDILEDIVLTLTLFEDREMIEERLKTYAHLFDDKVMKQLKRRRYTGWGRLSRKLINGIRDKQSGKTILDFLKSDGFANRNFMQLIHDDSLTFKEDIQKAQVSGQGDSLHEHIANLAGSPAIKKGILQTVKVVDELVKVMGRHKPENIVIEMARENQTTQKGQKNSRERMKRIEEGIKELGSQILKEHPVENTQLQNEKLYLYYLQNGRDMYVDQELDINRLSDYDVDAIVPQSFLKDDSIDNKVLTRSDKNRGKSDNVPSEEVVKKMKNYWRQLLNAKLITQRKFDNLTKAERGGLSELDKAGFIKRQLVETRQITKHVAQILDSRMNTKYDENDKLIREVKVITLKSKLVSDFRKDFQFYKVREINNYHHAHDAYLNAVVGTALIKKYPKLESEFVYGDYKVYDVRKMIAKSEQEIGKATAKYFFYSNIMNFFKTEITLANGEIRKRPLIETNGETGEIVWDKGRDFATVRKVLSMPQVNIVKKTEVQTGGFSKESILPKRNSDKLIARKKDWDPKKYGGFDSPTVAYSVLVVAKVEKGKSKKLKSVKELLGITIMERSSFEKNPIDFLEAKGYKEVKKDLIIKLPKYSLFELENGRKRMLASAGELQKGNELALPSKYVNFLYLASHYEKLKGSPEDNEQKQLFVEQHKHYLDEIIEQISEFSKRVILADANLDKVLSAYNKHRDKPIREQAENIIHLFTLTNLGAPAAFKYFDTTIDRKRYTSTKEVLDATLIHQSITGLYETRIDLSQLGGDSGGKRPAATKKAGQAKKKKASDAKSLTAWSRTLVTFKDVFVDFTREEWKLLDTAQQILYRNVMLENYKNLVSLGYQLTKPDVILRLEKGEEPWLVEREIHQETHPDSETAFEIKSSVPKKKRKV

SEQ ID NO: 1509 - DNA, 6399 bp, synthetic construct
  source 1..6399: mol_type = other DNA
  misc_feature 1..6399: note = DNMT3A/L(CRISPROFF)-XTEN80-dSpCas9-KRAB (nt)
agtaaccatgaccaggaatttgaccccccaaaggtttacccacctgtgccagctgagaagaggaagcccatccgcgtgctgtctctctttgatgggattgctacagggctcctggtgctgaaggacctgggcatccaagtggaccgctacattgcctccgaggtgtgtgaggactccatcacggtgggcatggtgcggcaccagggaaagatcatgtacgtcggggacgtccgcagcgtcacacagaagcatatccaggagtggggcccattcgacctggtgattggaggcagtccctgcaatgacctctccattgtcaaccctgcccgcaagggactttatgagggtactggccgcctcttctttgagttctaccgcctcctgcatgatgcgcggcccaaggagggagatgatcgccccttcttctggctctttgagaatgtggtggccatgggcgttagtgacaagagggacatctcgcgatttcttgagtctaaccccgtgatgattgacgccaaagaagtgtctgctgcacacagggcccgttacttctggggtaaccttcctggcatgaacaggcctttggcatccactgtgaatgataagctggagctgcaagagtgtctggagcacggcagaatagccaagttcagcaaagtgaggaccattaccaccaggtcaaactctataaagcagggcaaagaccagcatttccccgtcttcatgaacgagaaggaggacatcctgtggtgcactgaaatggaaagggtgtttggcttccccgtccactacacagacgtctccaacatgagccgcttggcgaggcagagactgctgggccgatcgtggagcgtgccggtcatccgccacctcttcgctccgctgaaggaatattttgcttgtgtgtctagcggcaatagtaacgctaacagccgcgggccgagcttcagcagcggcctggtgccgttaagcttgcgcggcagccatatgggccctatggagatatacaagacagtgtctgcatggaagagacagccagtgcgggtactgagcctcttcagaaacatcgacaaggtactaaagagtttgggcttcttggaaagcggttctggttctgggggaggaacgctgaagtacgtggaagatgtcacaaatgtcgtgaggagagacgtggagaaatggggcccctttgacctggtgtacggctcgacgcagcccctaggcagctcttgtgatcgctgtcccggctggtacatgttccagttccaccggatcctgcagtatgcgctgcctcgccaggagagtcagcggcccttcttctggatattcatggacaatctgctgctgactgaggatgaccaagagacaactacccgcttccttcagacagaggctgtgaccctccaggatgtccgtggcagagactaccagaatgctatgcgggtgtggagcaacattccagggctgaagagcaagcatgcgcccctgaccccaaaggaagaagagtatctgcaagcccaagtcagaagcaggagcaagctggacgccccgaaagttgacctcctggtgaagaactgccttctcccgctgagagagtacttcaagtatttttctcaaaactcacttcctcttggagggccgagctctggcgcacccccaccaagtggagggtctcctgccgggtccccaacatctactgaagaaggcaccagcgaatccgcaacgcccgagtcaggccctggtacctccacagaaccatctgaaggtagtgcgcctggttccccagctggaagccctacttccaccgaagaaggcacgtcaaccgaaccaagtgaaggatctgcccctgggaccagcactgaaccatctgaggttaaccccaagaagaagcggaaggtgggcatccacggcgtgcccgccgccgacaagaagtacagcatcggcctggccatcggcaccaacagcgtgggctgggccgtgatcaccgacgagtacaaggtgcccagcaagaagttcaaggtgctgggcaacaccgaccggcacagcatcaagaagaacctgatcggcgccctgctgttcgacagcggcgagaccgccgaggccacccggctgaagcggaccgcccggcggcggtacacccggcggaagaaccggatctgctacctgcaggagatcttcagcaacgagatggccaaggtggacgacagcttcttccaccggctggaggagagcttcctggtggaggaggacaagaagcacgagcggcaccccatcttcggcaacatcgtggacgaggtggcctaccacgagaagtaccccaccatctaccacctgcggaagaagctggtggacagcaccgacaaggccgacctgcggctgatctacctggccctggcccacatgatcaagttccggggccacttcctgatcgagggcgacctgaaccccgacaacagcgacgtggacaagctgttcatccagctggtgcagacctacaaccagctgttcgaggagaaccccatcaacgccagcggcgtggacgccaaggccatcctgagcgcccggctgagcaagagccggcggctggagaacctgatcgcccagctgcccggcgagaagaagaacggcctgttcggcaacctgatcgccctgagcctgggcctgacccccaacttcaagagcaacttcgacctggccgaggacgccaagctgcagctgagcaaggacacctacgacgacgacctggacaacctgctggcccagatcggcgaccagtacgccgacctgttcctggccgccaagaacctgagcgacgccatcctgctgagcgacatcctgcgggtgaacaccgagatcaccaaggcccccctgagcgccagcatgatcaagcggtacgacgagcaccaccaggacctgaccctgctgaaggccctggtgcggcagcagctgcccgagaagtacaaggagatcttcttcgaccagagcaagaacggctacgccggctacatcgacggcggcgccagccaggaggagttctacaagttcatcaagcccatcctggagaagatggacggcaccgaggagctgctggtgaagctgaaccgggaggacctgctgcggaagcagcggaccttcgacaacggcagcatcccccaccagatccacctgggcgagctgcacgccatcctgcggcggcaggaggacttctaccccttcctgaaggacaaccgggagaagatcgagaagatcctgaccttccggatcccctactacgtgggccccctggcccggggcaacagccggttcgcctggatgacccggaagagcgaggagaccatcaccccctggaacttcgaggaggtggtggacaagggcgccagcgcccagagcttcatcgagcggatgaccaacttcgacaagaacctgcccaacgagaaggtgctgcccaagcacagcctgctgtacgagtacttcaccgtgtacaacgagctgaccaaggtgaagtacgtgaccgagggcatgcggaagcccgccttcctgagcggcgagcagaagaaggccatcgtggacctgctgttcaagaccaaccggaaggtgaccgtgaagcagctgaaggaggactacttcaagaagatcgagtgcttcgacagcgtggagatcagcggcgtggaggaccggttcaacgccagcctgggcacctaccacgacctgctgaagatcatcaaggacaaggacttcctggacaacgaggagaacgaggacatcctggaggacatcgtgctgaccctgaccctgttcgaggaccgggagatgatcgaggagcggctgaagacctacgcccacctgttcgacgacaaggtgatgaagcagctgaagcggcggcggtacaccggctggggccggctgagccggaagctgatcaacggcatccgggacaagcagagcggcaagaccatcctggacttcctgaagagcgacggcttcgccaaccggaacttcatgcagctgatccacgacgacagcctgaccttcaaggaggacatccagaaggcccaggtgagcggccagggcgacagcctgcacgagcacatcgccaacctggccggcagccccgccatcaagaagggcatcctgcagaccgtgaaggtggtggacgagctggtgaaggtgatgggccggcacaagcccgagaacatcgtgatcgagatggcccgggagaaccagaccacccagaagggccagaagaacagccgggagcggatgaagcggatcgaggagggcatcaaggagctgggcagccagatcctgaaggagcaccccgtggagaacacccagctgcagaacgagaagctgtacctgtactacctgcagaacggccgggacatgtacgtggaccaggagctggacatcaaccggctgagcgactacgacgtggacgccatcgtgccccagagcttcctgaaggacgacagcatcgacaacaaggtgctgacccggagcgacaagaaccggggcaagagcgacaacgtgcccagcgaggaggtggtgaagaagatgaagaactactggcggcagctgctgaacgccaagctgatcacccagcggaagttcgacaacctgaccaaggccgagcggggcggcctgagcgagctggacaaggccggcttcatcaagcggcagctggtggagacccggcagatcaccaagcacgtggcccagatcctggacagccggatgaacaccaagtacgacgagaacgacaagctgatccgggaggtgaaggtgatcaccctgaagagcaagctggtgagcgacttccggaaggacttccagttctacaaggtgcgggagatcaacaactaccaccacgcccacgacgcctacctgaacgccgtggtgggcaccgccctgatcaagaagtaccccaagctggagagcgagttcgtgtacggcgactacaaggtgtacgacgtgcggaagatgatcgccaagagcgagcaggagatcggcaaggccaccgccaagtacttcttctacagcaacatcatgaacttcttcaagaccgagatcaccctggccaacggcgagatccggaagcggcccctgatcgagaccaacggcgagaccggcgagatcgtgtgggacaagggccgggacttcgccaccgtgcggaaggtgctgagcatgccccaggtgaacatcgtgaagaagaccgaggtgcagaccggcggcttcagcaaggagagcatcctgcccaagcggaacagcgacaagctgatcgcccggaagaaggactgggaccccaagaagtacggcggcttcgacagccccaccgtggcctacagcgtgctggtggtggccaaggtggagaagggcaagagcaagaagctgaagagcgtgaaggagctgctgggcatcaccatcatggagcggagcagcttcgagaagaaccccatcgacttcctggaggccaagggctacaaggaggtgaagaaggacctgatcatcaagctgcccaagtacagcctgttcgagctggagaacggccggaagcggatgctggccagcgccggcgagctgcagaagggcaacgagctggccctgcccagcaagtacgtgaacttcctgtacctggccagccactacgagaagctgaagggcagccccgaggacaacgagcagaagcagctgttcgtggagcagcacaagcactacctggacgagatcatcgagcagatcagcgagttcagcaagcgggtgatcctggccgacgccaacctggacaaggtgctgagcgcctacaacaagcaccgggacaagcccatccgggagcaggccgagaacatcatccacctgttcaccctgaccaacctgggcgcccccgccgccttcaagtacttcgacaccaccatcgaccggaagcggtacaccagcaccaaggaggtgctggacgccaccctgatccaccagagcatcaccggcctgtacgagacccggatcgacctgagccagctgggcggcgacagcggcggcaagcggcccgccgccaccaagaaggccggccaggccaagaagaagaaggctagcgatgctaagtcactgactgcctggtcccggacactggtgaccttcaaggatgtgtttgtggacttcaccagggaggagtggaagctgctggacactgctcagcagatcctgtacagaaatgtgatgctggagaactataagaacctggtttccttgggttatcagcttactaagccagatgtgatcctccggttggagaagggagaagagccctggctggtggagagagaaattcaccaagagacccatcctgattcagagactgcatttgaaatcaaatcatcagttccgaaaaagaaacgcaaagtttag

SEQ ID NO: 1510 - protein, 2132 aa, synthetic construct
  REGION 1..2132: note = DNMT3A/L(CRISPROFF)-XTEN80-dSpCas9-KRAB (AA)
SNHDQEFDPPKVYPPVPAEKRKPIRVLSLFDGIATGLLVLKDLGIQVDRYIASEVCEDSITVGMVRHQGKIMYVGDVRSVTQKHIQEWGPFDLVIGGSPCNDLSIVNPARKGLYEGTGRLFFEFYRLLHDARPKEGDDRPFFWLFENVVAMGVSDKRDISRFLESNPVMIDAKEVSAAHRARYFWGNLPGMNRPLASTVNDKLELQECLEHGRIAKFSKVRTITTRSNSIKQGKDQHFPVFMNEKEDILWCTEMERVFGFPVHYTDVSNMSRLARQRLLGRSWSVPVIRHLFAPLKEYFACVSSGNSNANSRGPSFSSGLVPLSLRGSHMGPMEIYKTVSAWKRQPVRVLSLFRNIDKVLKSLGFLESGSGSGGGTLKYVEDVTNVVRRDVEKWGPFDLVYGSTQPLGSSCDRCPGWYMFQFHRILQYALPRQESQRPFFWIFMDNLLLTEDDQETTTRFLQTEAVTLQDVRGRDYQNAMRVWSNIPGLKSKHAPLTPKEEEYLQAQVRSRSKLDAPKVDLLVKNCLLPLREYFKYFSQNSLPLGGPSSGAPPPSGGSPAGSPTSTEEGTSESATPESGPGTSTEPSEGSAPGSPAGSPTSTEEGTSTEPSEGSAPGTSTEPSEVNPKKKRKVGIHGVPAADKKYSIGLAIGTNSVGWAVITDEYKVPSKKFKVLGNTDRHSIKKNLIGALLFDSGETAEATRLKRTARRRYTRRKNRICYLQEIFSNEMAKVDDSFFHRLEESFLVEEDKKHERHPIFGNIVDEVAYHEKYPTIYHLRKKLVDSTDKADLRLIYLALAHMIKFRGHFLIEGDLNPDNSDVDKLFIQLVQTYNQLFEENPINASGVDAKAILSARLSKSRRLENLIAQLPGEKKNGLFGNLIALSLGLTPNFKSNFDLAEDAKLQLSKDTYDDDLDNLLAQIGDQYADLFLAAKNLSDAILLSDILRVNTEITKAPLSASMIKRYDEHHQDLTLLKALVRQQLPEKYKEIFFDQSKNGYAGYIDGGASQEEFYKFIKPILEKMDGTEELLVKLNREDLLRKQRTFDNGSIPHQIHLGELHAILRRQEDFYPFLKDNREKIEKILTFRIPYYVGPLARGNSRFAWMTRKSEETITPWNFEEVVDKGASAQSFIERMTNFDKNLPNEKVLPKHSLLYEYFTVYNELTKVKYVTEGMRKPAFLSGEQKKAIVDLLFKTNRKVTVKQLKEDYFKKIECFDSVEISGVEDRFNASLGTYHDLLKIIKDKDFLDNEENEDILEDIVLTLTLFEDREMIEERLKTYAHLFDDKVMKQLKRRRYTGWGRLSRKLINGIRDKQSGKTILDFLKSDGFANRNFMQLIHDDSLTFKEDIQKAQVSGQGDSLHEHIANLAGSPAIKKGILQTVKVVDELVKVMGRHKPENIVIEMARENQTTQKGQKNSRERMKRIEEGIKELGSQILKEHPVENTQLQNEKLYLYYLQNGRDMYVDQELDINRLSDYDVDAIVPQSFLKDDSIDNKVLTRSDKNRGKSDNVPSEEVVKKMKNYWRQLLNAKLITQRKFDNLTKAERGGLSELDKAGFIKRQLVETRQITKHVAQILDSRMNTKYDENDKLIREVKVITLKSKLVSDFRKDFQFYKVREINNYHHAHDAYLNAVVGTALIKKYPKLESEFVYGDYKVYDVRKMIAKSEQEIGKATAKYFFYSNIMNFFKTEITLANGEIRKRPLIETNGETGEIVWDKGRDFATVRKVLSMPQVNIVKKTEVQTGGFSKESILPKRNSDKLIARKKDWDPKKYGGFDSPTVAYSVLVVAKVEKGKSKKLKSVKELLGITIMERSSFEKNPIDFLEAKGYKEVKKDLIIKLPKYSLFELENGRKRMLASAGELQKGNELALPSKYVNFLYLASHYEKLKGSPEDNEQKQLFVEQHKHYLDEIIEQISEFSKRVILADANLDKVLSAYNKHRDKPIREQAENIIHLFTLTNLGAPAAFKYFDTTIDRKRYTSTKEVLDATLIHQSITGLYETRIDLSQLGGDSGGKRPAATKKAGQAKKKKASDAKSLTAWSRTLVTFKDVFVDFTREEWKLLDTAQQILYRNVMLENYKNLVSLGYQLTKPDVILRLEKGEEPWLVEREIHQETHPDSETAFEIKSSVPKKKRKV

SEQ ID NO: 1511 - protein, 543 aa, synthetic construct
  REGION 1..543: note = DNMT3A/L (AA)
NHDQEFDPPKVYPPVPAEKRKPIRVLSLFDGIATGLLVLKDLGIQVDRYIASEVCEDSITVGMVRHQGKIMYVGDVRSVTQKHIQEWGPFDLVIGGSPCNDLSIVNPARKGLYEGTGRLFFEFYRLLHDARPKEGDDRPFFWLFENVVAMGVSDKRDISRFLESNPVMIDAKEVSAAHRARYFWGNLPGMNRPLASTVNDKLELQECLEHGRIAKFSKVRTITTRSNSIKQGKDQHFPVFMNEKEDILWCTEMERVFGFPVHYTDVSNMSRLARQRLLGRSWSVPVIRHLFAPLKEYFACVSSGNSNANSRGPSFSSGLVPLSLRGSHMGPMEIYKTVSAWKRQPVRVLSLFRNIDKVLKSLGFLESGSGSGGGTLKYVEDVTNVVRRDVEKWGPFDLVYGSTQPLGSSCDRCPGWYMFQFHRILQYALPRQESQRPFFWIFMDNLLLTEDDQETTTRFLQTEAVTLQDVRGRDYQNAMRVWSNIPGLKSKHAPLTPKEEEYLQAQVRSRSKLDAPKVDLLVKNCLLPLREYFKYFSQNSLPL

SEQ ID NO: 1512 - DNA, 1158 bp, synthetic construct
  source 1..1158: mol_type = other DNA
  misc_feature 1..1158: note = DNMT3L (nt)
atggcggccatcccagccctggacccagaggccgagcccagcatggacgtgattttggtgggatccagtgagctctcaagctccgtttcacccgggacaggcagagatcttattgcatatgaagtcaaggctaaccagcgaaatatagaagacatctgcatctgctgcggaagtctccaggttcacacacagcaccctctgtttgagggagggatctgcgccccatgtaaggacaagttcctggatgccctcttcctgtacgacgatgacgggtaccaatcctactgctccatctgctgctccggagaaacgctgctcatctgcggaaaccctgattgcacccgatgctactgcttcgagtgtgtggatagcctggtcggccccgggacctcggggaaggtgcacgccatgagcaactgggtgtgctacctgtgcctgccgtcctcccgaagcgggctgctgcagcgtcggaggaagtggcgcagccagctcaaggccttctacgaccgagagtcggagaatccccttgagatgttcgaaaccgtgcctgtgtggaggagacagccagtccgggtgctgtccctttttgaagacatcaagaaagagctgacgagtttgggctttttggaaagtggttctgacccgggacaactgaagcatgtggttgatgtcacagacacagtgaggaaggatgtggaggagtggggacccttcgatcttgtgtacggcgccacacctcccctgggccacacctgtgaccgtcctcccagctggtacctgttccagttccaccggctcctgcagtacgcacggcccaagccaggcagccccaggcccttcttctggatgttcgtggacaatctggtgctgaacaaggaagacctggacgtcgcatctcgcttcctggagatggagccagtcaccatcccagatgtccacggcggatccttgcagaatgctgtccgcgtgtggagcaacatcccagccataaggagcaggcactgggctctggtttcggaagaagaattgtccctgctggcccagaacaagcagagctcgaagctcgcggccaagtggcccaccaagctggtgaagaactgctttctccccctaagagaatatttcaagtatttttcaacagaactcacttcctcttta

SEQ ID NO: 1513 - DNA, 966 bp, synthetic construct
  source 1..966: mol_type = other DNA
  misc_feature 1..966: note = DNMT3A (nt)
acctacgggctgctgcggcggcgagaggactggccctcccggctccagatgttcttcgctaataaccacgaccaggaatttgaccctccaaaggtttacccacctgtcccagctgagaagaggaagcccatccgggtgctgtctctctttgatggaatcgctacagggctcctggtgctgaaggacttgggcattcaggtggaccgctacattgcctcggaggtgtgtgaggactccatcacggtgggcatggtgcggcaccaggggaagatcatgtacgtcggggacgtccgcagcgtcacacagaagcatatccaggagtggggcccattcgatctggtgattgggggcagtccctgcaatgacctctccatcgtcaaccctgctcgcaagggcctctacgagggcactggccggctcttctttgagttctaccgcctcctgcatgatgcgcggcccaaggagggagatgatcgccccttcttctggctctttgagaatgtggtggccatgggcgttagtgacaagagggacatctcgcgatttctcgagtccaaccctgtgatgattgatgccaaagaagtgtcagctgcacacagggcccgctacttctggggtaaccttcccggtatgaacaggccgttggcatccactgtgaatgataagctggagctgcaggagtgtctggagcatggcaggatagccaagttcagcaaagtgaggaccattactacgaggtcaaactccataaagcagggcaaagaccagcattttcctgtcttcatgaatgagaaagaggacatcttatggtgcactgaaatggaaagggtatttggtttcccagtccactatactgacgtatccaacatgagccgcttggcgaggcagagactgctgggccggtcatggagcgtgccagtcatccgccacctcttcgctccgctgaaggagtattttgcgtgtgtg

SEQ ID NO: 1514 - protein, 322 aa, synthetic construct
  REGION 1..322: note = DNMT3A (AA)
TYGLLRRREDWPSRLQMFFANNHDQEFDPPKVYPPVPAEKRKPIRVLSLFDGIATGLLVLKDLGIQVDRYIASEVCEDSITVGMVRHQGKIMYVGDVRSVTQKHIQEWGPFDLVIGGSPCNDLSIVNPARKGLYEGTGRLFFEFYRLLHDARPKEGDDRPFFWLFENVVAMGVSDKRDISRFLESNPVMIDAKEVSAAHRARYFWGNLPGMNRPLASTVNDKLELQECLEHGRIAKFSKVRTITTRSNSIKQGKDQHFPVFMNEKEDILWCTEMERVFGFPVHYTDVSNMSRLARQRLLGRSWSVPVIRHLFAPLKEYFACV

SEQ ID NO: 1515 - DNA, 1629 bp, synthetic construct
  source 1..1629: mol_type = other DNA
  misc_feature 1..1629: note = DNMT3A/L v1 (nt)
aaccatgaccaggaatttgaccccccaaaggtttacccacctgtgccagctgagaagaggaagcccatccgcgtgctgtctctctttgatgggattgctacagggctcctggtgctgaaggacctgggcatccaagtggaccgctacattgcctccgaggtgtgtgaggactccatcacggtgggcatggtgcggcaccagggaaagatcatgtacgtcggggacgtccgcagcgtcacacagaagcatatccaggagtggggcccattcgacctggtgattggaggcagtccctgcaatgacctctccattgtcaaccctgcccgcaagggactttatgagggtactggccgcctcttctttgagttctaccgcctcctgcatgatgcgcggcccaaggagggagatgatcgccccttcttctggctctttgagaatgtggtggccatgggcgttagtgacaagagggacatctcgcgatttcttgagtctaaccccgtgatgattgacgccaaagaagtgtctgctgcacacagggcccgttacttctggggtaaccttcctggcatgaacaggcctttggcatccactgtgaatgataagctggagctgcaagagtgtctggagcacggcagaatagccaagttcagcaaagtgaggaccattaccaccaggtcaaactctataaagcagggcaaagaccagcatttccccgtcttcatgaacgagaaggaggacatcctgtggtgcactgaaatggaaagggtgtttggcttccccgtccactacacagacgtctccaacatgagccgcttggcgaggcagagactgctgggccgatcgtggagcgtgccggtcatccgccacctcttcgctccgctgaaggaatattttgcttgtgtgtctagcggcaatagtaacgctaacagccgcgggccgagcttcagcagcggcctggtgccgttaagcttgcgcggcagccatatgggccctatggagatatacaagacagtgtctgcatggaagagacagccagtgcgggtactgagcctcttcagaaacatcgacaaggtactaaagagtttgggcttcttggaaagcggttctggttctgggggaggaacgctgaagtacgtggaagatgtcacaaatgtcgtgaggagagacgtggagaaatggggcccctttgacctggtgtacggctcgacgcagcccctaggcagctcttgtgatcgctgtcccggctggtacatgttccagttccaccggatcctgcagtatgcgctgcctcgccaggagagtcagcggcccttcttctggatattcatggacaatctgctgctgactgaggatgaccaagagacaactacccgcttccttcagacagaggctgtgaccctccaggatgtccgtggcagagactaccagaatgctatgcgggtgtggagcaacattccagggctgaagagcaagcatgcgcccctgaccccaaaggaagaagagtatctgcaagcccaagtcagaagcaggagcaagctggacgccccgaaagttgacctcctggtgaagaactgccttctcccgctgagagagtacttcaagtatttttctcaaaactcacttcctctt

SEQ ID NO: 1516 - DNA, 1629 bp, synthetic construct
  source 1..1629: mol_type = other DNA
  misc_feature 1..1629: note = DNMT3A/L v2 (nt)
aaccacgatcaggagtttgacccccctaaggtgtacccacccgtgccagccgagaagaggaagcccatccgcgtgctgtccctgttcgacggcatcgccacaggcctgctggtgctgaaggatctgggcatccaggtggacagatatatcgcctccgaggtgtgcgaggattctatcaccgtgggcatggtgaggcaccagggcaagatcatgtacgtgggcgacgtgcgcagcgtgacacagaagcacatccaggagtggggacccttcgacctggtcatcggaggcagcccctgtaatgacctgtccatcgtgaaccctgcaaggaagggcctgtatgagggaaccggcagactgttctttgagttctacaggctgctgcacgacgcccgccctaaggagggcgatgacaggccattcttttggctgtttgagaacgtggtggccatgggcgtgagcgacaagcgggatatctccagattcctggagtctaatcccgtgatgatcgatgcaaaggaggtgtctgccgcacacagggcaaggtacttttggggaaatctgcctggcatgaaccgcccactggccagcaccgtgaacgacaagctggagctgcaggagtgcctggagcacggaaggatcgccaagttctccaaggtgcggacaatcaccacaagatctaacagcatcaagcagggcaaggatcagcacttccccgtgttcatgaatgagaaggaggacatcctgtggtgtaccgagatggagcgcgtgttcggctttccagtgcactatacagacgtgagcaatatgagccggctggcaaggcagagactgctgggccggtcctggtctgtgccagtgatcagacacctgttcgcccccctgaaggagtactttgcctgcgtgtctagcggcaactctaatgccaacagcagaggcccttccttttcctctggcctggtgccactgtctctgaggggcagccacatgggccccatggagatctacaagaccgtgtccgcctggaagaggcagcctgtgcgcgtgctgtctctgttccgcaacatcgacaaggtgctgaagagcctgggctttctggagagcggatccggatctggaggaggcaccctgaagtatgtggaggatgtgacaaatgtggtgcggagagatgtggagaagtggggccccttcgatctggtgtacggatccacccagccactgggaagctcctgcgataggtgtccaggatggtatatgttccagtttcacagaatcctgcagtacgcactgccaaggcaggagagccagcgccctttcttttggatctttatggacaacctgctgctgacagaggatgaccaggagacaacaacccgcttcctgcagacagaggcagtgaccctgcaggatgtgaggggacgcgactatcagaatgccatgcgggtgtggtctaacatccctggcctgaagagcaagcacgcccccctgacccctaaggaggaggagtacctgcaggcccaggtgcggagcagatccaagctggatgcccctaaggtggacctgctggtgaagaattgtctgctgccactgcgggagtacttcaagtactttagtcagaatagcctgccactg

SEQ ID NO: 1517 - protein, 215 aa, synthetic construct
  REGION 1..215: note = Murine DNMT3L
MGPMEIYKTVSAWKRQPVRVLSLFRNIDKVLKSLGFLESGSGSGGGTLKYVEDVTNVVRRDVEKWGPFDLVYGSTQPLGSSCDRCPGWYMFQFHRILQYALPRQESQRPFFWIFMDNLLLTEDDQETTTRFLQTEAVTLQDVRGRDYQNAMRVWSNIPGLKSKHAPLTPKEEEYLQAQVRSRSKLDAPKVDLLVKNCLLPLREYFKYFSQNSLPL

SEQ ID NO: 1518 - protein, 301 aa, Homo sapiens
  REGION 1..301: note = Human DNMT3A
NHDQEFDPPKVYPPVPAEKRKPIRVLSLFDGIATGLLVLKDLGIQVDRYIASEVCEDSITVGMVRHQGKIMYVGDVRSVTQKHIQEWGPFDLVIGGSPCNDLSIVNPARKGLYEGTGRLFFEFYRLLHDARPKEGDDRPFFWLFENVVAMGVSDKRDISRFLESNPVMIDAKEVSAAHRARYFWGNLPGMNRPLASTVNDKLELQECLEHGRIAKFSKVRTITTRSNSIKQGKDQHFPVFMNEKEDILWCTEMERVFGFPVHYTDVSNMSRLARQRLLGRSWSVPVIRHLFAPLKEYFACV

SEQ ID NO: 1519 - protein, 213 aa, Homo sapiens
  REGION 1..213: note = C-terminal human DNM3L
NPLEMFETVPVWRRQPVRVLSLFEDIKKELTSLGFLESGSDPGQLKHVVDVTDTVRKDVEEWGPFDLVYGATPPLGHTCDRPPSWYLFQFHRLLQYARPKPGSPRPFFWMFVDNLVLNKEDLDVASRFLEMEPVTIPDVHGGSLQNAVRVWSNIPAIRSRHWALVSEEELSLLAQNKQSSKLAAKWPTKLVKNCFLPLREYFKYFSTELTSSL

SEQ ID NO: 1520 - protein, 27 aa, synthetic construct
  REGION 1..27: note = Linker
SSGNSNANSRGPSFSSGLVPLSLRGSH

SEQ ID NO: 1521 - protein, 421 aa, synthetic construct
  REGION 1..421: note = Murine DNMT3L
MGSRETPSSCSKTLETLDLETSDSSSPDADSPLEEQWLKSSPALKEDSVDVVLEDCKEPLSPSSPPTGREMIRYEVKVNRRSIEDICLCCGTLQVYTRHPLFEGGLCAPCKDKFLESLFLYDDDGHQSYCTICCSGGTLFICESPDCTRCYCFECVDILVGPGTSERINAMACWVCFLCLPFSRSGLLQRRKRWRHQLKAFHDQEGAGPMEIYKTVSAWKRQPVRVLSLFRNIDKVLKSLGFLESGSGSGGGTLKYVEDVTNVVRRDVEKWGPFDLVYGSTQPLGSSCDRCPGWYMFQFHRILQYALPRQESQRPFFWIFMDNLLLTEDDQETTTRFLQTEAVTLQDVRGRDYQNAMRVWSNIPGLKSKHAPLTPKEEEYLQAQVRSRSKLDAPKVDLLVKNCLLPLREYFKYFSQNSLPL
